(19) United States
(12) Patent Application Publication
(10) Pub. No.: US 2021/0246519 A1
(43) Pub. Date: Aug. 12, 2021

(54) SPIKED PRIMERS FOR ENRICHMENT OF PATHOGEN NUCLEIC ACIDS AMONG BACKGROUND OF NUCLEIC ACIDS

(71) Applicant: The Regents of the University of California, Oakland, CA (US)

(72) Inventors: Charles Chiu, Oakland, CA (US); Xianding Deng, Oakland, CA (US)

(21) Appl. No.: 17/049,320

(22) PCT Filed: May 3, 2019
(86) PCT No.: PCT/US2019/030746

§ 371 Date: Oct. 20, 2020

Related U.S. Application Data
(60) Provisional application No. 62/667,334, filed on May 4, 2018.
(60) Provisional application No. 62/816,003, filed on Mar. 8, 2019.

(51) Int. Cl. C12Q 1/70; C12Q 1/6869; C12Q 1/6895; G16B 25/20; G16B 10/00; G16B 30/10

(52) U.S. Cl. CPC C12Q 1/703; C12Q 1/6869; G16B 30/10; G16B 25/20; G16B 10/00; C12Q 1/6895

(57) ABSTRACT

Methods, compositions and kits for detection of a taxon of pathogenic microorganisms in a sample are provided. Also provided are methods, compositions and kits for detecting taxons of pathogenic microorganisms present in low titers in a sample. Compositions, methods and kits for detection of pathogenic co-infections are also provided.

### CROSS REFERENCE TO RELATED APPLICATIONS

[0001] This application claims priority under 35 U.S.C. § 119 from Provisional Application Ser. No. 62/667,334 filed May 4, 2018, and from Provisional Application Ser. No. 62/816,003 filed Mar. 8, 2019, the disclosures of which are incorporated herein by reference for all purposes.

### GOVERNMENT LICENSE RIGHTS

[0002] This invention was made with Government support under Grant Nos: R21 AI120977 and R01 HL105704, awarded by the National Institutes of Health. The Government has certain rights in the invention.

### FIELD

[0003] The present disclosure relates to the field of genomics and diagnostics, and more particularly to the detection and genomic characterization of pathogenic microorganisms in a sample.

### INCORPORATION BY REFERENCE OF SEQUENCE LISTING

[0004] Accompanying this filing is a Sequence Listing entitled “00138-005WO1_SL.txt”, created on Apr. 30, 2019, and having 1,706,058 bytes of data, machine formatted on IBM-PC, MS-Windows operating system. The sequence listing is hereby incorporated herein by reference in its entirety for all purposes.

### BACKGROUND

[0005] The threat from new or re-emerging viruses has markedly increased in recent decades due to population growth, urbanization, and expansion of global travel, facilitating rapid spread of infection during an outbreak. Over the past 4 decades, epidemics from human immunodeficiency virus (HIV) (1981-present), SARS (2002-2004) and MERS (2012-present) coronaviruses, 2009 pandemic influenza H1N1 and avian influenza viruses (1996-present), EBOV virus (EBOV) in West Africa (2013-2016) and Zika virus (ZIKV) in the Americas (2015-2016) (Reperant and Osterhaus, 2017) have occurred. Initial identification and containment of these outbreaks were hindered by their occurrence in resource-poor settings and/or the lack of access to diagnostic assays that could detect a novel, unanticipated viral strain. This lack of preparedness underscores the important need for the deployment of effective diagnostic and surveillance tools able to rapidly screen for infected patients and guide public health interventions that curb transmission.

### SUMMARY

[0006] Various embodiments of the disclosure address the above problems of pathogen detection and enrichment. For example, a method of detecting a first taxon of pathogenic microorganisms in a sample can include: obtaining an environmental, plant, or animal sample and/or a sample from a human subject to be screened for a first taxon of pathogens, applying a sequencing assay to the sample to obtain sequence reads, and determining whether the first taxon of pathogenic microorganisms is present in the sample. The sequencing assay includes primers (e.g., spiked primers) that are of such a length (e.g., 11-17 base pairs) as to preferentially amplify certain sequences associated with the first taxon and that do not amplify sequences associated with one or more other taxa of pathogens. Generally, the one or more other taxa of pathogenic microorganisms are amplified using random primers, present in an amount, proportion or ratio that is less than the primers associated with the first taxon of pathogenic microorganisms (e.g., spiked primers). Generally, the ratio of spiked primers to random primer is about 5:1, about 10:1, about 20:1, or more. In this manner, if the sample (environmental, plant, animal, and/or from a human subject) is possibly infected with, or has been exposed to one or more pathogenic microorganisms (including the first taxon of pathogens), embodiments allow for the screening of multiple pathogenic microorganisms using the same assay, while still allowing certain pathogenic microorganisms to be targeted so as to enable detection when present at low amounts. Additionally, the methods provide for the enrichment of the first taxon through the use of spiked primers without sacrificing metagenomic sensitivity obtained utilizing random primers. Thus, detection of untargeted pathogenic microorganisms and/or pathogenic co-infections within the sample can be enabled by detecting two different pathogen taxa from the same sample.

[0007] Advantages of the disclosure over multiplex PCR and probe capture techniques include a lack of a requirement for primer optimization, which is typically required in multiplex PCR, and improved detection times, as compared to probe capture techniques that usually require an additional >18-24-hour period due to hybridization times. Another advantageous attribute of the disclosure is that the methods provide sufficient enrichment of a first taxon of pathogenic microorganisms that allows for detection of the first taxon of pathogenic microorganisms that is less affected by the background of the host organism (e.g., human) nor hinders the detection of other pathogen taxa present in the sample. For example, the use of smaller proportions of random primers as compared to spiked primers resulted in less amplification of high-background sequences in a sample (e.g., human ribosomal RNA, etc.) and thus enriched the sample for pathogenic microorganisms by depleting the presence of human host sequences in the sample sequencing library. The method therefore provides adequate enrichment of a first taxon of pathogenic microorganisms while not adversely affecting metagenomic sensitivity.

[0008] In one example, the sequencing assay can include primers having a length within a range of 11-17 base pairs, wherein at least a portion of the sequence regions targeted by the primers were identified in a first set or one or more reference sequences corresponding to the first taxon of pathogens. In one example, the sequencing assay can include a plurality of primers wherein at least one primer from SEQ ID NOs: 1-96, 399-1562, 1563-3553, and 3554-7324.

[0009] In another example, the sequencing assay can include a polymerase chain reaction (PCR) or any of its derivatives such as, but not limited to, real-time PCR, quantitative PCR, reverse transcription PCR, and reverse transcription quantitative PCR, or a non-PCR amplification strategy such as isothermal transcription-mediated amplification (TMA). The sequencing assay can comprise from 1 to 5,000 or more primer pairs. In one example, the sequencing assay can include reverse transcription of a sample containing RNA using any of the primers disclosed herein. In another example, any of the primers in SEQ ID NOs: 1-96, 399-1562, 1563-3553, and 3554-7324 can be included in the sequencing assay. In one example, the primers can further comprise a nucleic acid adapter sequence. For example, when performing reverse transcription PCR (RT-PCR) using the methods of the disclosure for identifying RNA viruses, the presence of an adapter is optional; however, when performing the methods of the disclosure on an DNA sample (e.g., bacterial genomes), an adapter can be particularly useful. In one embodiment, an adapter can be attached to any of the primers in SEQ ID NOs: 3554-7324 at the 5′ end. Preferably, the nucleic acid adapter is located 5′ of the primer. In one example, the adapter is used as a primer in a subsequent nucleic acid amplification reaction (e.g., PCR). The adapter sequence can also have embedded within it type I and type IIs restriction endonucleases sites such that, when cleaved by restriction endonucleases, they produce overhangs (staggered ends) that can be selectively ligated with another adapter for next-generation sequencing (NGS). In some embodiments, the adapter comprises SEQ ID NO:97. The sequencing reads obtained by the sequencing assay may be present in raw or processed form to remove, for example, low quality or low-complexity sequencing reads. In one example, the sequencing assay provides greater than 10 sequencing reads and fewer than 100,000 sequencing reads per amplified target nucleic acid present in the sample.

[0010] The disclosure also provides an oligonucleotide comprising, consisting essentially of or consisting of any one or more of the sequences set forth in SEQ ID NOs: 1-96, 399-1562, 1563-3553, and/or 3554-7324 or probes set forth in SEQ ID NO:98-397 and/or 398.

[0011] The sequencing assay can further include one or more probes, such as but not limited to, any of the probes set forth in SEQ ID NOs: 98-398. In some embodiments, the probes are labeled or produce a detectable signal from which a user can determine whether the first taxon of pathogenic microorganisms is present in the sample. In one example, the probe may be used to determine (e.g., quantify) the amount of amplified target produced by the primers of the sequencing assay.

[0012] In some embodiments, the first taxon of pathogenic microorganisms is selected from bacteria, archaea, viruses, protozoa, prions, fungi, algae, microscopic parasites (e.g., helminths) or other disease- or illness-inducing microbe. In some embodiments, the first taxon of pathogenic microorganisms corresponds to viral pathogens, such as but not limited to viruses of List 1. In one example, the first taxon is a Flavivirus or Alphavirus. In another example, the first taxon of pathogenic microorganisms encompasses one or more species selected from West Nile Virus, dengue virus, tick-borne encephalitis virus, Chikungunya virus, Ebola virus, Marburg virus, Lassa virus, Rift Valley Fever Virus, Crimean-Congo hemorrhagic fever virus, Japanese encephalitis virus, yellow fever virus, Zika virus, cell fusing agent virus, Palm Creek virus and Parramatta River virus. Of particular interest are viruses present in the sample in low viral titers (i.e., less than 10,000 viral genome copies per mL of sample). For example, the first taxon of pathogenic microorganisms can be present in the sample at a volume of less than 10,000 genome copies per mL, less than 9,000 genome copies per mL, less than 8,000 genome copies per mL, less than 7,000 genome copies per mL, less than 6,000 genome copies per mL, less than 5,000 genome copies per mL, less than 4,000 genome copies per mL, less than 3,000 genome copies per mL, less than 2,000 genome copies per mL, less than 1,000 genome copies per mL, less than 900 genome copies per mL, less than 800 genome copies per mL, less than 700 genome copies per mL, less than 600 genome copies per mL, less than 500 genome copies per mL, less than 400 genome copies per mL, less than 300 genome copies per mL, less than 200 genome copies per mL, less than 100 genome copies per mL, less than 90 genome copies per mL, less than 80 genome copies per mL, less than 70 genome copies per mL, less than 60 genome copies per mL, less than 50 genome copies per mL, less than 40 genome copies per mL, less than 30 genome copies per mL, less than 20 genome copies per mL, less than 10 genome copies per mL, or any range of genome copies per mL that includes or is between and two of the foregoing genome copies per mL (e.g., from 100 genome copies per mL to 1,000 genome copies per mL). Accordingly, the methods, kits and compositions of the disclosure allow for detection of a co-infection in the sample.

[0013] The methods, compositions and kits disclosed herein can be used with a variety of sample types from a variety of different sources (e.g., clinical, plant, animal, or environmental samples). For example, the sample can include whole blood, serum, plasma, urine, tissue samples, biopsy samples, water samples, food samples, environmental samples, test-wipes of a location or device, and isolated nucleic acids. In one embodiment, the sample is obtained from a human subject, such as a human patient or a subject believed to be infected by a first taxon of pathogens. In another embodiment, the sample is obtained from an environmental site believed to be infected or contaminated by a first taxon of pathogens. Environmental sites, can include sites found outdoors or indoors, such as a hospital room.

[0014] In some embodiments, the one or more reference sequences corresponding to the first taxon of pathogenic microorganisms can comprise a complete or partial genome of the first taxon of pathogens.

[0015] Multiple reference genomes or portions of the genome (such as individual genes) can be used for spiked primer design, including those from different phyla (e.g., viral, fungal, or bacterial genomes). A multiple sequence alignment can be made of a number of related genomes (from 2 to 10,000 and any integer therebetween) and either the consensus alignment sequence or the totality of the aligned sequences can be used as the reference to design the spiked primers (FIGS. 2A and 10A). The disclosure provides a method for providing and developing a spiked primer composition. The method includes aligning 2 to 10,000 related genomes (e.g., viral, bacterial, or fungi genomes). By “related genomes” means genomes in the same taxonomic phylum, class, order family or genus. Identifying, from the alignment, overlapping sequences having a length of 30 bp, 40 bp, 50 bp, 60 bp, 70 bp, 80 bp, 90 bp, 100 bp, 110 bp, 120 bp, 130 bp, 140 bp, 150 bp, 160 bp, 170 bp, 180 bp, 190 bp, 200 bp, 210 bp, 220 bp, 230 bp, 240 bp, 250 bp, 260 bp, 270 bp, 280 bp, 290 bp, 300 bp, 310 bp, 320 bp, 330 bp, 340 bp, 350 bp, 360 bp, 370 bp, 380 bp, 390 bp, 400 bp, 410 bp, 420 bp, 430 bp, 440 bp, 450 bp, 460 bp, 470 bp, 480 bp, 490 bp, 500 bp, or any range that includes or is between any two of the foregoing values, (e.g., 50-100 bp, 50-200 bp, 50-300 bp, 50-500 bp, 50-1000 bp, 100-200 bp, 100-300 bp, 100-400 bp, 100-500 bp, 200-300 bp, 200-400 bp, 200-500 bp, 300-400 bp, and 300-500 bp in length (and any integer between any of the foregoing ranges). Determining a primer pair (forward and reverse) that are about 10-50 bp in length from the overlapping sequence. For each primer sequence identifying the shortest unique primer length (i.e., the k-mer) which is typically about 11-17 nt in length (e.g., about 13 nt in length). Filter the selected primers by Tm (e.g., <2 SD from mean) and remove self-dimers or cross-dimers and remove homopolymer repeats (e.g., >5 nt). Providing a library of the identified primers based upon the foregoing. In one embodiment, the method further includes generating a plurality of the primers so identified using an oligonucleotide synthesizer and assaying the “spiked” primers generated.

[0016] In another example, a nucleic acid molecule for detecting a target sequence from a first taxon of pathogenic microorganisms is disclosed. The nucleic acid molecule can include a primer that is at least 90% complementary to the target sequence. In one embodiment, the primer is 10, 11, 12, 13, 14, 15, 16, 17, 18, 19 or 20 nucleotides in length, or any range that includes or is between any two of the foregoing values (e.g., 11 to 17 nucleotides in length). In another embodiment, the primer consists of one of the sequences in SEQ ID NOs: 1-96, 399-1562, 1563-3553, and 3554-7324 alone or wherein the primer consists of the “primer” sequence and is linked to an adapter sequence. For example, primers that are complementary or substantially complementary to the genome of one or more human viruses are contemplated by the disclosure. In some embodiments, the primer molecule includes a nucleic acid adapter positioned 5′ of the primer. In one example, the adapter comprises SEQ ID NO:97.

[0017] In another example, the present disclosure provides a kit comprising at least one primer set forth in SEQ ID NOs: 1-96, 399-1562, 1563-3553, and 3554-7324. In some embodiments, the kit further comprises an adapter appended to the 5′ terminus of a primer for use in a sequencing assay. In one example, the adapter is SEQ ID NO:97, other adapters useful for various sequencing methods will be readily identified by one of skill in the art. In some embodiments, the kit further comprises one or more additional primers, probes or reagents. In one example, the one or more additional primers can include primers that are between 6 and 12 nucleotides in length. In one example, the additional primers can include one or more nucleotide modifications. In another example, the additional primers include random hexamers, random septamers, random octamers, or random nonamers. In one example, the kit can further include one or more probes as set forth in SEQ ID NO: 98-398.

[0018] In a particular embodiment, the disclosure provides a method for designing spiked primer sequences that enrich sequencing reads for detecting a taxon or taxa of pathogenic microorganisms in a sample, the method comprising: (i) performing multiple sequence alignments (MSA) of a plurality of genomes from a set of one or more reference genomes from a taxon or taxa of pathogens; (ii) partitioning the MSA-aligned genomes into overlapping 300 to 600 nucleotide (nt) segments with at least a 150 nt overlap; (iii) selecting forward and/or reverse candidate primer sequences having lengths that are within a range of 11 bp to 17 bp from 30 to 70 nt regions at the ends of each 300 to 600 nt segment by frequency of occurrence in the set of overlapping 300 to 600 nt segments: (iv) ranking the candidate primer sequences iteratively in reverse order by frequency of occurrence in the overlapping 300 to 600 nucleotide (nt) segments; (v) selecting top candidate primer sequences based upon the candidate primer sequences being shared by the most 300 to 600 nt segments and by not containing any ambiguous 300 to 600 nt segments; (vi) removing 300 to 600 nt segments which share top candidate primer sequences and repeating steps (iii) to (v) until the number of the remaining 300 to 600 nt segments containing a shared candidate primer sequence is below a pre-designated threshold integer value selected from 1 to 15 in order to generate a set of top candidate primer sequences; (viii) generating a set of spiked primer sequences from the set of top candidate primer sequences by removing top candidate primer sequences that (a) have melting temperatures (Tm) greater than 2 standard deviations from the mean, (b) are predicted to self-dimerize or cross dimerize with a hybridization ΔG<−9 kcal/mol or lower, and/or (c) have homopolymer repeats of greater than 5 nucleotides. In another embodiment, the set of one or more reference genomes are from a taxon or taxa of pathogenic bacteria, viruses, protozoa, fungi, archaea, algae and/or eukaryotic parasites. In yet another embodiment, the set of one or more reference genomes encompasses viral genomes selected from a taxon or taxa of one or more Families of viruses including Reoviridae, Caliciviridae, Flaviviridae, Orthomyxoviridae, Picornaviridae, Togaviridae, Paramyxoviridae, Bunyaviridae, Rhabdoviridae, Filoviridae, Coronaviridae, Astroviridae, Bornaviridae, Arteriviridae, Hepeviridae, and/or Retroviridae. In a further embodiment, the set of one or more reference genomes encompasses viral genomes selected from a taxon of the Flaviviridae Family of viruses. In yet a further embodiment, the set of one or more reference genomes encompasses viral genomes selected from a taxon or taxa of one or more Genera of viruses including Ahjdlikevirus, Alfamovirus, Allexivirus, Allolevivirus, Alphabaculovirus, Alphacarmotetravirus, Alphacoronavirus, Alphaentomopoxvirus, Alphafusellovirus, Alphaguttavirus, Alphalipothrixvirus, Alphamesonivirus, Alphanecrovirus, Alphanodavirus, Alphanudivirus, Alphapapillomavirud, Alphapartitivirus, Alphapermutotetravirus, Alpharetrovirus, Alphasphaerolipovirus, Alphaspiravirus, Alphatorquevirus, Alphaturrivirus, Alphavirus, Amalgavirus, Ambidensovirus Amdoparvovirus, Ampelovirus, Ampullavirus, Andromedalikevirus, Anulavirus, Aparavirus, Aphthovirus, Apscaviroid, Aquabirnavirus, Aquamavirus, Aquaparamyxovirus, Aquareovirus, Arterivirus, Ascovirus, Asfivirus, Atadenovirus, Aureusvirus, Aurivirus Avastrovirus, Avenavirus, Aveparvovirus, Aviadenovirus, Avibirnavirus, Avihepadnavirus, Avihepatovirus, Avipoxvirus, Avisivirus, Avsunviroid, Avulavirus, Bacillarnavirus, Babuvirus, Bacilladnavirus, Barnavirus, Badnavirus, Bafinivirus, Bcep22likevirus, Barnyardlikevirus, Batrachovirus, Bdellomicrovirus, Bcep78likevirus, Bcepmulikevirus, Benyvirus, Becurtovirus, Begomovirus, Betaentomopoxvirus, Betabaculovirus, Betacoronavirus, Betalipothrixvirus, Betafusellovirus, Betaguttavirus, Betanudivirus, Betanecrovirus, Betanodavirus, Betaretrovirus, Betapapillomavirus, Betapartitivirus, Betatorquevirus, Betasphaerolipovirus, Betatetravirus, Bignuzlikevirus, Bicaudavirus, Bidensovirus, Bornavirus, Blosnavirus, Bocaparvovirus, Bracovirus, Botrexvirus, Bppunalikevirus, Bromovirus, Brambyvirus, Brevidensovirus, Bronlikevirus, Cafeteriavirus, Bymovirus, Cardiovirus, C2likevirus, C5likevirus, Carmovirus, Capillovirus, Capripoxvirus, Cervidpoxvirus, Cardoreovirus, Carlavirus, Che9clikevirus, Caulimovirus, Cavemovirus, Chipapillomavirus, Charlielikevirus, Che8likevirus, Chlorovirus, Cheravirus, Chilikevirus, Circovirus, Chlamydiamicrovirus, Chloriridovirus, Clavavirus, Chrysovirus, Cilevirus, Coccolithovirus, Citrivirus, Cjwunalikevirus, Comovirus, Closterovirus, Cocadviroid, Corticovirus, Coleviroid, Coltivirus, Cp8unalikevirus, Copiparvovirus, Corndoglikevirus, Crocodylidpoxvirus, Cosavirus, Cp220likevirus, Cuevavirus, Crinivirus, Cripavirus, Cyprinivirus, Cryspovirus, Cucumovirus, Cytorhabdovirus, Curtovirus, Cypovirus, Cystovirus, Cytomegalovirus, D3likevirus, Deltalipothrixvirus, Deltabaculovirus, D3112likevirus, Deltaretrovirus, Deltapapillomavirus, Deltacoronavirus, Dependoparvovirus, Deltatorquevirus, Deltapartitivirus, Dinodnavirus, Dianthovirus, Deltavirus, Dyodeltapapillomavirus, Dinornavirus, Dicipivirus, Dyoiotapapillomavirus, Dyoepsilonpapillomavirus, Dinovernavirus, Dyomupapillomavirus, Dyokappapapillomavirus, Dyoetapapillomavirus, Dyopipapillomavirus, Dyonupapillomavirus, Dyolambdapapillomavirus, Dyothetapapillomavirus Dyorhopapillomavirus, Dyoomikronpapillomavirus, Dyoxipapillomavirus, Dyosigmapapillomavirus, Dyozetapapillomavirus, Emaravirus, Enterovirus, Ebolavirus, Epsilon15likevirus, Enamovirus, Elaviroid, Epsilontorquevirus, Entomobirnavirus, Endornavirus, Errantivirus, Epsilonpapillomavirus, Ephemerovirus, Etatorquevirus, Eragrovirus, Epsilonretrovirus, Fabavirus, Erythroparvovirus, Erbovirus, Fijivirus, Felixounalikevirus, Etapapillomavirus, Furovirus, Flavivirus, F116likevirus, Ferlavirus, Foveavirus, Gallivirus, Gammabaculovirus, Gammaentomopoxvirus, Gammalipothrixvirus, Gammapartitivirus, Gammaretrovirus, Gallantivirus, Gammatorquevirus, Giardiavirus, Gammacoronavirus, Glossinavirus, Gyrovirus, Gammapapillomavirus, Gammasphaerolipovirus, Globulovirus, Halolikevirus, Hantavirus, Hemivirus, Hempavirus, Hepandensovirus, Hepatovirus, Hapunalikevirus, Hk578likevirus, Hordeivirus, Hepacivirus, Hpunalikevirus, Hunnivirus, Higrevirus, Hostuviroid, Hypovirus, Ichtadenovirus, I3likevirus, Idnoreovirus, Ictalurivirus, Ilarvirus, Iebhlikevirus, Ichnovirus, Influenzavirus B, Iltovirus, Idaeovirus, Iotapapillomavirus, Influenzavirus C, Iflavirus, Iridovirus, Iotatorquevirus, Influenzavirus A, Inovirus, Ipomovirus, Isavirus, Iteradensovirus, Jerseylikevirus, Kappapapillomavirus, Kappatorquevirus, Kobuvirus, Kunsagivirus, Labyrnavirus, Lambdapapillomavirus, Lagovirus, Lentivirus, Lambdatorquevirus, L5likevirus, Lolavirus, Leporipoxvirus, Lambdalikevirus, Lymphocryptovirus, Luteovirus, Leishmaniavirus, Lymphocystivirus, Levivirus, Luz24likevirus, Lyssavirus, Machlomovirus, Mamastrovirus, Macanavirus, Marafivirus, Macluravirus, Marnavirus, Mammarenavirus, Macavirus, Mastrevirus, Marburgvirus, Maculavirus, Megrivirus, Marseillevirus, Mandarivirus, Microvirus, Megabirnavirus, Mardivirus, Mischivirus, Metapneumovirus, Mastadenovirus, Morbillivirus, Mimivirus, Megalocytivirus, Mupapillomavirus, Mitovirus, Metavirus, Mycoflexivirus, Mosavirus, Mimoreovirus, Muromegalovirus, Molluscipoxvirus, Mycoreovirus, Mulikevirus, Muscavirus, N15likevirus, Nanovirus, Nepovirus, N4likevirus, Nucleorhabdovirus, Narnavirus, Nairovirus, Norovirus, Nebovirus, Nupapillomavirus, Novirhabdovirus, Nyavirus, Omegalikevirus, Omikronpapillomavirus, Orthobunyavirus, Okavirus, Orthopoxvirus, Omegapapillomavirus, Oleavirus, Oscivirus, Ophiovirus, Omegatetravirus, Orthohepadnavirus, Orbivirus, Orthoreovirus, Orthohepevirus, Ostreavirus, Oryzavirus, Ourmiavirus, Parechovirus, Pbiunalikevirus, Pegivirus, P2likevirus, P22likevirus, Percavirus, Panicovirus, P23likevirus, Petuvirus, Pasivirus, Parapoxvirus, Phi29likevirus, Pbunalikevirus, Passerivirus, Phicd119likevirus, Pelamoviroid, Pecluvirus, Phietalikevirus, Perhabdovirus, Penstyldensovirus, Phijlunalikevirus, Pgonelikevirus, Pestivirus, Phipapillomavirus, Phic3unalikevirus, Phaeovirus, Picobirnavirus, Phie125likevirus, Phicbklikevirus, Plasmavirus, Phyllikevirus, Phieco32likevirus, Poacevirus, Phikmvlikevirus, Phihlikevirus, Polyomavirus, Phlebovirus, Phikzlikevirus, Potexvirus, Pipapillomavirus, Phytoreovirus, Proboscivirus, Plectrovirus, Piscihepevirus, Pseudovirus, Polemovirus, Pneumovirus, Punalikevirus, Pomovirus, Polerovirus, Potyvirus, Pospiviroid, Protoparvovirus, Prasinovirus, Prymnesiovirus, Psimunalikevirus, Psipapillomavirus, Quaranjavirus, Quadrivirus, Raphidovirus, Reylikevirus, Rhopapillomavirus, Reptarenavirus, Roseolovirus, Rhadinovirus, Rubulavirus, Rosadnavirus, Ranavirus, Rotavirus, Respirovirus, Rubivirus, Rudivirus, Rymovirus, Rhizidiovirus, Rosavirus, Salivirus, Sap6likevirus, Schizot4virus, Sadwavirus, Seadornavirus, Salmonivirus, Sequivirus, Sapelovirus, Siadenovirus, Sclerodarnavirus, Sakobuvirus, Sigmavirus, Semotivirus, Salterprovirus, Skunalikevirus, Sfi1unalikevirus, Sapovirus, Soymovirus, Sicinivirus, Scutavirus, Spiromicrovirus, Simplexvirus, Senecavirus, Spumavirus, Sobemovirus, Sfi21dtunalikevirus, Sp6likevirus, Sigmapapillomavirus, Spounalikevirus, Sirevirus, Suipoxvirus, Solendovirus, Spbetalikevirus, Sprivivirus, T4virus, Taupapillomavirus, Tepovirus, Thetapapillomavirus, T5likevirus, Tibrovirus, Tectivirus, Tobravirus, Teschovirus, T7likevirus, Torovirus, Thetatorquevirus, Tenuivirus, Totivirus, Tm4likevirus, Tetraparvovirus, Trichomonasvirus, Tombusvirus, Thogotovirus, Tunalikevirus, Torradovirus, Tobamovirus, Turncurtovirus, Tp2unalikevirus, Topocuvirus, Trichovirus, Tospovirus, Tungrovirus, Tremovirus, Twortlikevirus, Tritimovirus, Tupavirus, Tymovirus, Umbravirus, Upsilonpapillomavirus, Varicellovirus, Velarivirus, Vesiculovirus, Victorivirus, Vitivirus, Varicosavirus, Vesivirus, Viunalikevirus, Waikavirus, Wbetalikevirus, Whispovirus, Xp10likevirus, Xipapillomavirus, Yualikevirus, Yatapoxvirus, Zetapapillomavirus, Zetatorquevirus, and/or Zeavirus. In a certain embodiment, the set of one or more reference genomes encompasses viral genomes from a taxon or taxa of one or more Species of viruses including West Nile Virus, dengue virus, tick-borne encephalitis virus, Japanese encephalitis virus, yellow fever virus, Zika virus, cell fusing agent virus, Palm Creek virus and/or Parramatta River virus. In another embodiment, the set of one or more reference genomes encompasses bacterial genomes from one or more from a taxon or taxa of one or more Genera of bacteria including Heliobacter, Aerobacter, Rhizobium, Agrobacterium, Bacillus, Clostridium, Pseudomonas, Xanthomonas, Nitrobacteriaceae, Nitrobacter, Nitrosomonas, Thiobacillus, Spirillum, Vibrio, Bacteroides, Corynebacterium, Listeria, Escherichia, Klebsiella, Salmonella, Serratia, Shigella, Erwinia, Rickettsia, Chlamydia, Mycoplasma, Actinomyces, Streptomyces, Mycobacterium, Polyangium, Micrococcus, Staphylococcus, Lactobacillus, Diplococcus, Streptococcus, and/or Campylobacter. In yet another embodiment, the set of one or more reference genomes encompasses fungal genomes from one or more from a taxon or taxa of one or more Genera of fungi including Anaeromyces, Caecomyces, Allomyces, Entyloma, Diskagma, Blastocladia, Funneliformis, Entylomella, Coelomomyces, Glomus (fungus), Fusidium, Heptameria, Holmiella, Homostegia, Hyalocrea, Hyalosphaera, Hypholoma, Hypobryon, Hysteropsis, Koordersiella, Karschia, Kirschsteiniothelia, Lembosiopeltis, Kullhemia, Kusanobotrys, Leptodothiorella, Lanatosphaera, Lasiodiplodia, Leveillina, Lepidopterella, Lepidostroma, Lollipopaia, Leptosphaerulina, Leptospora, Macrovalsaria, Lichenostigma, Licopolia, Massariola, Lopholeptosphaeria, Maireella, Microdothella, Macroventuria, Microcyclella, Mycoglaena, Melanodothis, Montagnella, Mycoporopsis, Moniliella, Mycopepon, Myriangium, Mycomicrothelia, Mycothyridium, Mytilostoma, Mycosphaerella, Mytilinidion, Neofusicoccum, Myriostigmella, Neocallimastix, Oomyces, Neopeckia, Orpinomyces, Ostreichnion, Ophiosphaerella, Paropodia, Passeriniella, Passerinula, Pedumispora, Peyronellaea, Phaeoacremonium, Phaeocyrtidula, Phaeoglaena, Phaeopeltosphaeria, Phaeoramularia, Phaeosperma, Phaneromyces, Phialophora, Philonectria, Phragmocapnias, Phragmosperma, Piedraia, Piromyces, Placocrea, Placostromella, Plagiostromella, Plejobolus, Pleostigma, Polychaeton, Pseudocercospora, Pseudocryptosporella, Pseudogymnoascus, Pseudothis, Pycnocarpon, Rhytidhysteron, Rhizophagus (fungus), Rhopographus, Rosellinula, Rhytisma, Robillardiella, Roussoellopsis, Rosenscheldia, Rostafinskia, Sarcopodium, Savulescua, Saksenaeaceae, Scolecobonaria, Scolicotrichum, Schizoparme, Semifissispora, Septoria, Scorias, Sphaceloma, Sphaerellothecium, Spathularia, Stagonosporopsis, Stenella (fungus), Sphaerulina, Stigmina (fungus), Stioclettia, Stigmidium, Sydowia, Tephromela, Stuartella, Teichosporella, Thalloloma, Taeniolella, Thalassoascus, Togninia, Teratosphaeria, Thyrospora, Thyridaria, Yarrowia, Wettsteinina, Valsaria, Ustilaginoidea, Yoshinagella, Wernerella (fungus), and/or Vismya. In a further embodiment, the set of one or more reference genomes encompasses genomes from one or more from a taxon or taxa of pathogenic microorganisms that are resistant to a particular anti-pathogen treatment. In yet a further embodiment, the anti-pathogen therapy is selected from an antibiotic treatment, antiviral treatment, antifungal treatment, or algicide. In yet a further embodiment, the MSA-aligned genomes are partitioned into overlapping 500 nt to 600 nt segments with a 200 nt to 300 nt overlap. In a certain embodiment, the candidate primer sequences are 13 bp to 15 bp in length. In another embodiment, the forward or reverse candidate primer sequences are selected from 40 nt to 60 nt regions at the ends of each segment. In yet another embodiment, a method disclosed herein further comprises the step of: (ix) chemically synthesizing a set of spiked primers that corresponds with the set of spiked primer sequences. In a further embodiment, the set of spiked primers are synthesized using an automated oligonucleotide synthesizer.

[0019] In a particular embodiment, the disclosure also provides a method of detecting a first taxon or taxa of pathogenic microorganisms in a sample, the method comprising: applying a sequencing assay to the sample to obtain sequence reads, the sequencing assay including a set of spiked primers designed by a method disclosed herein and random primers; and analyzing the sequence reads to determine whether the first taxon of pathogenic microorganisms and/or one or more other taxa of pathogenic microorganisms are present in the sample. In another embodiment, the sample is from a subject. In yet another embodiment, the subject is a human. In a further the sample is selected from whole blood, serum, plasma, urine, tissue sample, biopsy sample, isolated DNA and isolated RNA. In yet a further embodiment, the sample is a serum or urine sample. In a certain embodiment, the sample is obtained from an environmental site believed to be infected or contaminated by a taxon or taxa of pathogenic microorganisms. In another embodiment, the environmental site is a hospital room, hospice room, sewage, or contaminated water. In yet another embodiment, the sample is from a vector that is known to transmit pathogens. In a further embodiment, the vector is a mosquito, sandfly, tick, triatomine bug, tsetse fly, flea, black fly, aquatic snail, or lice. In yet a further embodiment, the sequencing assay comprises or utilizes polymerase chain reaction (PCR). In a certain embodiment, the PCR is quantitative PCR (qPCR), reverse-transcription polymerase chain reaction (RT-PCR), or reverse transcription quantitative polymerase chain reaction (RT-qPCR). In another embodiment, the sequencing assay comprises reverse transcription of a sample containing RNA using any of the primers set forth in SEQ ID NOs: 1-96, and 399-7324. In yet another embodiment, the sequencing assay provides greater than 10 sequencing reads and fewer than 100,000 sequencing reads per amplified target nucleic acid. In a further embodiment, wherein at least one, two, three, four, or more of the sequence regions targeted by the spiked primers were identified in the set of one or more reference sequences corresponding to the taxon or taxa of pathogenic microorganisms. In yet a further embodiment, the taxon or taxa of pathogenic microorganisms is present in the sample at a volume of less than 1,000 genome copies per mL. In a certain embodiment, the taxon or taxa of pathogenic microorganisms is present in the sample at a volume of less than 100 genome copies per mL. In another embodiment, the sample comprises a different taxon or taxa of pathogenic microorganisms at a volume of between 10,000-100,000 genome copies per mL. In yet another embodiment, at least one of the set of spiked primers of the sequencing assay comprises a nucleotide sequence selected from SEQ ID NOs:1-96 or 399-7324. In a further embodiment, the set of spiked primers of the sequencing assay comprises primers having nucleotide sequences of SEQ ID NOs:1-96. In yet a further embodiment, the set of spiked primers of the sequencing assay comprise primers having nucleotide sequences of SEQ ID NOs: 399-1562. In a certain embodiment, the set of spiked primers of the sequencing assay comprise primers having nucleotide sequences of SEQ ID NOs: 1563-3553. In another embodiment, the set of spiked primers of the sequencing assay comprise primers having nucleotide sequences of SEQ ID NOs: 3554-7324. In yet another embodiment, the spiked primers further comprise an adaptor sequence. In a further embodiment, the adapter sequence is positioned 5′ of the spiked primer sequences and comprises the sequence of SEQ ID NO:97. In yet a further embodiment, the random primers are random hexamers, random septamers, random octamers, and/or random nonamers. In a certain embodiment, the random primers are random hexamers and/or random nonamers. In another embodiment, the ratio of spiked primers to random primers in the sequencing assay is 2:1, 3:1, 4:1, 5:1, 6:1, 7:1, 8:1, 9:1, 10:1, or greater than 10:1. In yet another embodiment, the ratio of spiked primers to random primers in the sequencing assay is about 5:1. In a further embodiment, the sequencing assay further comprises a probe that is used to determine the amount of amplified product produced in the sequencing assay.

[0020] In a particular embodiment, the disclosure further provides for a kit comprising a set of spiked primers that comprises primers having nucleotide sequences of SEQ ID NOs:1-96, SEQ ID NOs: 399-1562, SEQ ID NOs: 1563-3553, and/or SEQ ID NOs: 3554-7324. In another embodiment, the primers further comprise an adapter sequence. In yet another embodiment, the adapter sequence is positioned 5′ of the primer sequences and comprises the sequence of SEQ ID NO:97. In a further embodiment, the kit further comprises random hexamer and/or random nonamer primers. In yet a further embodiment, the kit further comprises one or more probes having sequences selected from SEQ ID NOs:98-398.

[0021] These and other embodiments are described in more detail below.

### BRIEF DESCRIPTION OF THE DRAWINGS

[0022] FIG. 1A-C presents Zika virus sampling and sequencing in Central America and Mexico. (A) Map of Central America and Mexico. Circles indicate Zika virus sampling locations of genomes sequences generated in this study and publicly available genome sequences. (B) Temporal and geographic distribution of Zika virus RT-qPCR positive samples identified in this study. (C) Representation of the genomic sequences of 61 Zika virus genomes generated by the studies disclosed herein.

[0023] FIG. 2A-B displays the spiked primer approach for ZIKV enrichment from metagenomic libraries. (A) Flow chart of the design algorithm. Short, 13-nt primers are designed from an arbitrary set of viral reference genomes by consecutive steps of multiple sequence alignment, partitioning of the consensus sequence, and forward and reverse primer selection within 50-nt windows. (B) Diagram of exemplary metagenomic library preparation protocol. Various combinations of spiked and/or random primers, with and without adapter sequences for single-primer amplification, were tested. The protocol corresponding to conventional multiplex RT-PCR is shown for purposes of comparison. Additional bead-based enrichment using bait capture probes can be included prior to sequencing after cDNA library amplification.

[0024] FIG. 3A-B displays geographic and temporal distribution of Zika virus cases in Central America and Mexico. (A) Zika virus cases (confirmed or suspected) as measured over time plotted against climatic vector data. Each panel corresponds to a country within Central America or Mexico region. In each panel, the bar plots show available notified ZIKV case data until May 2017 (plots adapted from PAHO). In each panel, dashed lines indicate the estimated climatic vector suitability score averaged across the country. Arrows indicate the earliest confirmation of Zika virus autochthonous cases. (B) Maximum likelihood phylogeny and temporal signal of the Zika virus Asian genotype lineage. The phylogeny was estimated using PhyML based on complete and partial (>1500 nt) coding genome sequences. Statistical supports for nodes were assessed using a bootstrap approach (100 replicates). Only bootstrap supports >50 at internal nodes are displayed. Symbols at phylogenetic tips denote sampling locations of the sequences. Circles and triangles denote sequences publicly available and sequences generated in the study, respectively. The regression plot shows the correlation between the sampling date of each sequence and the genetic distance of that sequence from the root of the phylogeny. Circles denote tips of the phylogeny with its corresponding sampling location.

[0025] FIG. 4A-C demonstrates the epidemic behavior of Zika virus in Central America and Mexico. (A) Phylogeography of Zika virus in the Americas. Maximum clade credibility phylogeny estimated from complete and partial Zika virus genomes of the Asian genotype using a Bayesian molecular clock phylogeographic approach. For visual clarity, Asian and Pacific lineages are not displayed and two clades corresponding to exports to South America (34 taxa) and Caribbean (68 taxa) are collapsed and indicated respectively by the two squares. Violin shapes indicate posterior distributions of estimated dates of nodes A and B. Different gray shadings indicate the most probable ancestral lineage locations. Circles at internal nodes denote posterior probabilities >0.75. For selected nodes, numbers show the posterior probabilities of ancestral locations or clade posterior probabilities. (B) Earliest inferred dates of Zika virus spread to and within Central America and Mexico. Each box-and-whisker plot corresponds to the earliest movement between a pair of locations with well-supported virus lineage migration. Colors within box-and-whisker plots indicated pairs of countries shown in (A) and letters indicated federal states of Mexico (C: Chiapas, O: Oaxaca, G: Guerrero). The dashed line shows the estimated average climatic vector suitability score across Honduras, which is predicted to be the source of introduction and spread of Zika virus in the region of Central and Mexico. (C) Effective reproductive number through time (Rₑ) estimated using a Birth Death Skyline approach from the median posterior estimate of the time to the most recent common ancestor of the Central and Mexico clade to the most recent sample. The solid orange line, darker shading and lighter shading represent respectively the median posterior estimate, 50% and 95% highest posterior densities.

[0026] FIG. 5A-C shows genome coverage plots corresponding to ZIKV and other untargeted viruses. (A) Exemplary data obtained using methods of the present disclosure. Here, Zika virus (ZIKV) primers (referred to herein as “spiked” primers) were compared to random primers (random hexamers (N6) or random nonamers (N9)) in a 5:1 ratio, versus random primers alone. Improvements in ZIKV reads per million (RPM) and genome coverage were observed using reverse spiked primers relative to random primers alone, whereas genomic coverage of untargeted human immunodeficiency virus (HIV-1) or hepatitis C virus (HCV) present in the sample was not compromised by the use of spiked primers. (B) Exemplary data obtained using both forward and reverse spiked primers in the presence of random primers in a 5:5:1 ratio. Improvements in Zika virus RPM and genome coverage were observed using reverse and forward spiked primers relative to random primers alone. (C) exemplary data obtained using Zika virus “spiked” reverse primers and random primers in a 10:1 ratio. Increasing the ratio of spiked primers did not result in further improvements in genome coverage.

[0027] FIG. 6 shows the genome coverage of Dengue virus 1 (DENV1) obtained during metagenomic Next-Generation Sequencing of a human sample using the methods disclosed herein.

[0028] FIG. 7 shows ancestral node location posterior probabilities for node B in (FIG. 4A), estimated using the complete dataset and ten replicate subsampled datasets.

[0029] FIG. 8A-C shows exemplary mNGS sequencing data obtained using various embodiments of the present disclosure. (A) and (B) Plots of the Zika Ct value as compared to deduplicated sequencing reads that were mapped to the Zika virus genome. (C) Plot of percent genome coverage versus read coverage of deduplicated or non-deduplicated mapped Zika virus sequencing reads.

[0030] FIG. 9 provides an exemplary computer system useful for performing methods of the disclosure.

[0031] FIG. 10A-B presents metagenomic sequencing with spiked primer enrichment (MSSPE) viral primer design and metagenomic sequencing workflow. (A) Algorithm for design of viral spiked primers. A set of viral reference genomes (60 to 3,571) were aligned using MAFFT multiple sequence alignment software (Katoh and Standley, 2014), followed by partitioning of each genome into 300-500 nucleotide (nt) overlapping segments. Forward and reverse 13 nt primers (“kmers”) were selected and filtered according to specific criteria (rounded rectangular box). Using this algorithm, primers were designed for 14 RNA viruses. Spiked primer panels for arboviruses (ArboV SP; n=4), hemorrhagic fever viruses (HFV SP; n=6), and all virus (A11V SP; n=13, excluding HCV) were also constructed. (B) Metagenomic sequencing workflow. MSSPE primers are added (“spiked”) to the reaction mix during the reverse transcription step of cDNA synthesis, without adding to the overall turnaround time for the library preparation and sequencing analysis protocols. The MSSPE workflow is compatible with subsequent enrichment using tiling multiplex PCR and/or capture probes (dotted lines). Metagenomic sequence data is analyzed for pathogen identification using SURPI software.

[0032] FIG. 11A-H provides spiked primer enrichment of viral sequences using MSSPE. Shown in A-C are XY plots of the fold enrichment achieved for contrived samples containing ZIKV, DENV, EBOV, and/or MS2 bacteriophage (MS2) at defined titers and using random hexamer (RH) primers only or at spiked primer (SP) concentrations ranging from 1 M to 40 M or 80 M. (A) Enrichment of ZIKV and DENV using an arbovirus spiked primer (ArboV SP) panel, (B) Enrichment of EBOV using a hemorrhagic fever virus spiked primer (HFV SP) panel, (C) Enrichment of ZIKV, DENV, and EBOV using an all virus spiked primer (A11V SP) panel. Shown in D-G are box-and-whisker plots of the fold enrichment achieved for contrived samples containing ZIKV, DENV, and/or EBOV at titers ranging from 10 to 1,000 copies (cp)/mL. The asterisks denote virus/concentration combinations that were not tested. (D) Enrichment of ZIKV, DENV, and EBOV using virus-specific spiked primers (SP) at 4 μM concentration. (E) Enrichment of ZIKV and DENV using the ArboV SP panel at 10 μM concentration. (F) Enrichment of EBOV using the HFV SP panel at 20 μM concentration. (G) Enrichment of ZIKV, DENV, and EBOV using the A11V SP panel at 10 μM concentration. (H) Fold enrichment across all experimental replicates is plotted as a bar-and-whisker graph by detected virus or viruses and SP panel used.

[0033] FIG. 12A-E presents improvements in viral genome coverage using MSSPE. The fold coverage (y-axis) is plotted as a function of nucleotide position (x-axis). For each graph, the number of reads is normalized to the total number of viral reads obtained with no enrichment. (A) Genome coverage of the ZIKV MRC766 (Uganda) strain at 1,000 copies (cp)/mL concentration with no enrichment (top) or MSSPE enrichment using ZIKV spiked primers (ZIKV SP) (second), an arbovirus spiked primer (ArboV SP) panel (third), or an all virus spiked primer (A11V SP) panel (bottom). (B) Genome coverage of an HIV-1 Group M, CRF01 strain at 1,000 cp/mL concentration with no enrichment (left) or using HIV-1 spiked primers (HIV-1 SP) (right). (C) Genome coverage of an HCV genotype 4 strain at 10,000 cp/mL concentration with no enrichment (left) or using HCV spiked primers (HCV SP). (D) Genome coverage of a Powassan virus (POWV) strain identified in cerebrospinal fluid (CSF) from an infected patient with tickborne meningoencephalitis with no enrichment (left) or using the ArboV SP panel. (E) Genome coverage of a strain from a patient from Mexico with acute ZIKV infection during the 2013-2016 outbreak (ZIKV/Homo sapiens/MEX/2016/mex30) at ˜2,000 cp/mL concentration with no enrichment (top) or enrichment using MSSPE (second), tiling multiplex PCR (third), capture probes (fourth, using random primers alone), or MSSPE followed by capture probes (bottom). The red bars below the coverage plots show nucleotide regions with coverage of >10×, at a threshold to minimize impact from potential cross-contamination, with the overall corresponding genome coverage given in brackets.

### DETAILED DESCRIPTION

[0034] Unless defined otherwise, technical and scientific terms used herein have the same meaning as commonly understood by a person of ordinary skill in the art. See, e.g., Lackie, DICTIONARY OF CELL AND MOLECULAR BIOLOGY, Elsevier (4th ed. 2007); Sambrook et al., MOLECULAR CLONING, A LABORATORY MANUAL, Cold Spring Harbor Lab Press (Cold Spring Harbor, N.Y. 1989), both of which are incorporated herein by reference. All patents, patent applications, and publications mentioned herein are incorporated herein by reference in their entireties for all purposes.

[0035] The term “a”, “an” or “the” is intended to mean “one or more”, e.g., a pathogen refers to one or more pathogenic microorganisms unless otherwise made clear from the context of the text.

[0036] The term “comprise,” and variations thereof such as “comprises” and “comprising,” when preceding the recitation of a step or an element, are intended to mean that the addition of further steps or elements is optional and not excluded.

[0037] Also, the use of “or” means “and/or” unless stated otherwise. Similarly, “comprise,” “comprises,” “comprising” “include,” “includes,” and “including” are interchangeable and not intended to be limiting.

[0038] It is to be further understood that where descriptions of various embodiments use the term “comprising,” those skilled in the art would understand that in some specific instances, an embodiment can be alternatively described using language “consisting essentially of” or “consisting of.”

[0039] Unless defined otherwise, all technical and scientific terms used herein have the same meaning as commonly understood to one of ordinary skill in the art to which this disclosure belongs. Any methods and reagents similar or equivalent to those described herein can be used in the practice of the disclosed methods and compositions.

[0040] The disclosure provides MSSPE as a universal target enrichment method that was simple, low-cost, fast (incurring no extra turnaround time), and deployable on benchtop or portable sequencers. The MSSPE method was able to enrich reads from ZIKV, EBOV, and DENV ˜55× (median 6.3×) in low-titer clinical samples (10-10,000 copies/mL), improving detection sensitivity to 10 copies/mL and increasing genome coverage by 20-50% (average 40.3±16.3%). Notably, broad metagenomic sensitivity for pathogen detection was preserved, with enrichment of reads from emerging viruses that had not been specifically targeted a priori by the spiked primer design, including St. Louis encephalitis (SLEV), Usutu virus (USUV), and POWV, and little to no decrease in reads from off-target viruses (e.g., MS2 bacteriophage). The MSSPE method was also synergistic when combined with other enrichment strategies, further increasing the yield of viral reads for detection and gains in genome coverage. Enrichment was possible across a wide range of potential targets, from single viruses to expanded panels (arbovirus and hemorrhagic fevers) to inclusion of all spiked primers (n=4,792 to date). Taken together, the results demonstrate the potential utility of the MSSPE method for simultaneous viral diagnosis and genome surveillance of patients with unknown febrile infections in laboratory or field settings.

[0041] To enrich viruses from unknown clinical samples, the disclosure provides spiked primer panels to detect viruses associated with, e.g., arbovirus infection or hemorrhagic fever. The use of customized spiked primer panels allows potential targeting of the full range of viral pathogenic microorganisms associated with a geographic region (e.g., hemorrhagic fever viruses for testing in the DRC and arboviruses for testing in Brazil). Regional public health surveillance data can be leveraged in the design of updated spiked primer panels targeting actively circulating pathogens. This is especially important in facilitating the rapid development of diagnostic tests for a viral pathogen that is newly introduced to a geographic region (e.g., EBOV in West Africa, ZIKV in Brazil, 2009 pandemic H1N1 influenza in Mexico).

[0042] In addition to viral detection, the MSSPE method can be used for pathogen discovery and viral genome sequencing. As broad-spectrum metagenomic sensitivity for off-target pathogenic microorganisms is retained (or even occasionally enhanced, i.e. HIV with ZIKV primers), detection of novel, rare, unexpected, and/or co-infecting viruses in clinical samples is possible with MSSPE. Of note, the detection of USUV reads at lower sequencing depth required the inclusion of ArboV spiked primers, and spiked primer enrichment resulted in 18-43% increases in genome coverage for 3 emerging flaviviruses (USUV, SLEV, POWV). On average, the use of virus-specific primers improved genome recovery for 5 different viruses by 46% (±14.4%), or 36.5% (±16.8%) with the use of expanded panels (ArboV, HFV, and Ally). The minimum threshold that has been proposed for completion of a standard draft viral genome is >50%; the percentage of samples fulfilling this minimum coverage requirement increased from 15.8% (6 of 38) using mNGS alone to 81.6% (31 of 38) using MSSPE primers (Chi-squared test, p<0.0001).

[0043] The MSSPE method described herein is also effective in genome sequencing of recombinant HIV viruses, both circulating and unknown recombinant forms, which can also exhibit sequence divergence of up to 35% in the env gene, as well as multiple HCV genotypes. Interestingly, enrichment using MSSPE was occasionally noted for unrelated, off-target viruses, as in the case of HIV enrichment using ZIKV primers, or USUV enrichment using HIV primers. In the former case, enrichment was secondary to less binding of RH primers to background targets, including human host and contaminant bacterial and plant sequences. In the latter case, enrichment was likely secondary to 13 nt HIV-1 spiked primers exhibiting high homology to the USUV genome sequence. These results provide a proof-of-concept that clinical samples originally earmarked for viral genomic surveillance can be simultaneously screened using MSSPE for viral pathogen discovery efforts.

[0044] In addition to robust target enrichment, advantages of the MSSPE method include (i) a simple and convenient protocol, which does not incur extra time nor require additional reagents beyond the spiked primer mixes, (ii) compatibility with multiple library preparation protocols (e.g., transposon or adapter ligation-based, since the target enrichment occurs during the reverse transcription step), (iii) lack of apparent cross-contamination, (iv) low cost, and (v) synergy with other enrichment methods. With extremely low-titer samples (<10 copies/mL or Ct>40), especially on low-throughput, error prone platforms such as the MinION nanopore sequencer, combining MSSPE with a complementary tiled multiplex PCR or capture probe enrichment approach may be useful, as is shown herein and done previously for studying the genomic epidemiology of ZIKV in CAM. The MSSPE approach can also be extended for enrichment of DNA targets, such as identification of nonviral (bacterial, fungal, or parasitic) pathogenic microorganisms and antimicrobial resistance genes.

[0045] As used herein, the term “pathogen” refers to a virus, bacterium, protozoa, prion, archaea, fungus, algae, parasite, or other microbe (helminth) that causes or induces disease or illness in a subject. The term includes both the disease-causing organism per se (e.g., its genome) and toxins produced by the pathogen (e.g., Shiga toxins) present in a sample of the subject. Detection of a pathogen as set forth in the methods disclosed herein includes detection of a portion of the genome of the pathogen or a nucleic acid molecule that is complementary or substantially complementary (i.e., at least 90% complementary) to a portion of the genome of the pathogen.

[0046] With respect to the term “particular taxon of pathogens”, the term refers to classification or taxonomy of pathogens. Accordingly, a “particular taxon of pathogens” can include pathogenic microorganisms classified at various levels of taxonomic rank, e.g., by Realm (Riboviria), Domain/SubRealm (e.g., Bacteria, Arachaea), by Kingdom (e.g., Protista, Fungi, etc.), by Phylum (e.g., Vira, Chlamydiae, etc.), by Class (e.g., Chlamydiales, Parachlamydiales, etc.), by Order (e.g., caudovirales, herpesvirales, ligamenvirales, mononegavirales, etc.), by Family (e.g., Reoviridae, Caliciviridae, Flaviviridae, Orthomyxoviridae, Picornaviridae, Togaviridae, Paramyxoviridae, Bunyaviridae, Rhabdoviridae, Filoviridae, Coronaviridae, Astroviridae, Bornaviridae, Arteriviridae, Hepeviridae, Retroviridae, etc.), or by Genus (e.g., Hepacivirus, flavivirus, pegivirus, pestivirus, etc.). Thus, “a particular taxon of pathogens” refers to a group of related species that share significant properties, but may differ in host range and virulence. An exemplary taxonomic classification system of viruses suitable for use with the disclosure is the international committee on Taxonomy of viruses (ICTV) which organizes viruses based on the structure and composition of viruses. For example, the ICTV database, freely available at [https://]talk.ictvonline.org/ictv-reports/ictv_online_report/ (note the “https” has been bracketed to remove active hyperlinks) classifies viruses as either ssDNA viruses, ssDNA/dsRNA viruses, dsDNA viruses, dsRNA viruses, reverse transcribing DNA and RNA viruses, negative sense RNA viruses and positive sense RNA viruses. For purposes of this disclosure, “a particular taxon of viruses” will refer to a Family or Genus taxonomic level of related viruses. Typically, viral genus names end in the suffix -virus. Viral genera contemplated for use with the disclosure include any of the viral genera or viral species provided in List 1 and List 2, respectively.

[0047] List 1: Viral Genera:

Ahjdlikevirus, Alfamovirus, Allexivirus, Allolevivirus, Alphabaculovirus, Alphacarmotetravirus, Alphacoronavirus, Alphaentomopoxvirus, Alphafusellovirus, Alphaguttavirus, Alphalipothrixvirus, Alphamesonivirus, Alphanecrovirus, Alphanodavirus, Alphanudivirus, Alphapapillomavirud, Alphapartitivirus, Alphapermutotetravirus, Alpharetrovirus, Alphasphaerolipovirus, Alphaspiravirus, Alphatorquevirus, Alphaturrivirus, Alphavirus, Amalgavirus, Ambidensovirus Amdoparvovirus, Ampelovirus, Ampullavirus, Andromedalikevirus, Anulavirus, Aparavirus, Aphthovirus, Apscaviroid, Aquabirnavirus, Aquamavirus, Aquaparamyxovirus, Aquareovirus, Arterivirus, Ascovirus, Asfivirus, Atadenovirus, Aureusvirus, Aurivirus Avastrovirus, Avenavirus, Aveparvovirus, Aviadenovirus, Avibirnavirus, Avihepadnavirus, Avihepatovirus, Avipoxvirus, Avisivirus, Avsunviroid, Avulavirus, Bacillarnavirus, Babuvirus, Bacilladnavirus, Barnavirus, Badnavirus, Bafinivirus, Bcep22likevirus, Barnyardlikevirus, Batrachovirus, Bdellomicrovirus, Bcep78likevirus, Bcepmulikevirus, Benyvirus, Becurtovirus, Begomovirus, Betaentomopoxvirus, Betabaculovirus, Betacoronavirus, Betalipothrixvirus, Betafusellovirus, Betaguttavirus, Betanudivirus, Betanecrovirus, Betanodavirus, Betaretrovirus, Betapapillomavirus, Betapartitivirus, Betatorquevirus, Betasphaerolipovirus, Betatetravirus, Bignuzlikevirus, Bicaudavirus, Bidensovirus, Bornavirus, Blosnavirus, Bocaparvovirus, Bracovirus, Botrexvirus, Bppunalikevirus, Bromovirus, Brambyvirus, Brevidensovirus, Bronlikevirus, Cafeteriavirus, Bymovirus, Cardiovirus, C2likevirus, C5likevirus, Carmovirus, Capillovirus, Capripoxvirus, Cervidpoxvirus, Cardoreovirus, Carlavirus, Che9clikevirus, Caulimovirus, Cavemovirus, Chipapillomavirus, Charlielikevirus, Che8likevirus, Chlorovirus, Cheravirus, Chilikevirus, Circovirus, Chlamydiamicrovirus, Chloriridovirus, Clavavirus, Chrysovirus, Cilevirus, Coccolithovirus, Citrivirus, Cjwunalikevirus, Comovirus, Closterovirus, Cocadviroid, Corticovirus, Coleviroid, Coltivirus, Cp8unalikevirus, Copiparvovirus, Corndoglikevirus, Crocodylidpoxvirus, Cosavirus, Cp220likevirus, Cuevavirus, Crinivirus, Cripavirus, Cyprinivirus, Cryspovirus, Cucumovirus, Cytorhabdovirus, Curtovirus, Cypovirus, Cystovirus, Cytomegalovirus, D3likevirus, Deltalipothrixvirus, Deltabaculovirus, D3112likevirus, Deltaretrovirus, Deltapapillomavirus, Deltacoronavirus, Dependoparvovirus, Deltatorquevirus, Deltapartitivirus, Dinodnavirus, Dianthovirus, Deltavirus, Dyodeltapapillomavirus, Dinornavirus, Dicipivirus, Dyoiotapapillomavirus, Dyoepsilonpapillomavirus, Dinovernavirus, Dyomupapillomavirus, Dyokappapapillomavirus, Dyoetapapillomavirus, Dyopipapillomavirus, Dyonupapillomavirus, Dyolambdapapillomavirus, Dyothetapapillomavirus Dyorhopapillomavirus, Dyoomikronpapillomavirus, Dyopipapillomavirus, Dyosigmapapillomavirus, Dyozetapapillomavirus, Emaravirus, Enterovirus, Ebolavirus, Epsilon15likevirus, Enamovirus, Elaviroid, Epsilontorquevirus, Entomobirnavirus, Endornavirus, Errantivirus, Epsilonpapillomavirus, Ephemerovirus, Etatorquevirus, Eragrovirus, Epsilonretrovirus, Fabavirus, Erythroparvovirus, Erbovirus, Fijivirus, Felixounalikevirus, Etapapillomavirus, Furovirus, Flavivirus, F116likevirus, Ferlavirus, Foveavirus, Gallivirus, Gammabaculovirus, Gammaentomopoxvirus, Gammalipothrixvirus, Gammapartitivirus, Gammaretrovirus, Gallantivirus, Gammatorquevirus, Giardiavirus, Gammacoronavirus, Glossinavirus, Gyrovirus, Gammapapillomavirus, Gammasphaerolipovirus, Globulovirus, Halolikevirus, Hantavirus, Hemivirus, Hempavirus, Hepandensovirus, Hepatovirus, Hapunalikevirus, Hk578likevirus, Hordeivirus, Hepacivirus, Hpunalikevirus, Hunnivirus, Higrevirus, Hostuviroid, Hypovirus, Ichtadenovirus, I3likevirus, Idnoreovirus, Ictalurivirus, Ilarvirus, Iebhlikevirus, Ichnovirus, Influenzavirus B, Iltovirus, Idaeovirus, Iotapapillomavirus, Influenzavirus C, Iflavirus, Iridovirus, Iotatorquevirus, Influenzavirus A, Inovirus, Ipomovirus, Isavirus, Iteradensovirus, Jerseylikevirus, Kappapapillomavirus, Kappatorquevirus, Kobuvirus, Kunsagivirus, Labyrnavirus, Lambdapapillomavirus, Lagovirus, Lentivirus, Lambdatorquevirus, L5likevirus, Lolavirus, Leporipoxvirus, Lambdalikevirus, Lymphocryptovirus, Luteovirus, Leishmaniavirus, Lymphocystivirus, Levivirus, Luz24likevirus, Lyssavirus, Machlomovirus, Mamastrovirus, Macanavirus, Marafivirus, Macluravirus, Marnavirus, Mammarenavirus, Macavirus, Mastrevirus, Marburgvirus, Maculavirus, Megrivirus, Marseillevirus, Mandarivirus, Microvirus, Megabirnavirus, Mardivirus, Mischivirus, Metapneumovirus, Mastadenovirus, Morbillivirus, Mimivirus, Megalocytivirus, Mupapillomavirus, Mitovirus, Metavirus, Mycollexivirus, Mosavirus, Mimoreovirus, Muromegalovirus, Molluscipoxvirus, Mycoreovirus, Mulikevirus, Muscavirus, N15likevirus, Nanovirus, Nepovirus, N4likevirus, Nucleorhabdovirus, Narnavirus, Nairovirus, Norovirus, Nebovirus, Nupapillomavirus, Novirhabdovirus, Nyavirus, Omegalikevirus, Omikronpapillomavirus, Orthobunyavirus, Okavirus, Orthopoxvirus, Omegapapillomavirus, Oleavirus, Oscivirus, Ophiovirus, Omegatetravirus, Orthohepadnavirus, Orbivirus, Orthoreovirus, Orthohepevirus, Ostreavirus, Oryzavirus, Ourmiavirus, Parechovirus, Pbiunalikevirus, Pegivirus, P2likevirus, P22likevirus, Percavirus, Panicovirus, P23likevirus, Petuvirus, Pasivirus, Parapoxvirus, Phi29likevirus, Pbunalikevirus, Passerivirus, Phicd119likevirus, Pelamoviroid, Pecluvirus, Phietalikevirus, Perhabdovirus, Penstyldensovirus, Phijlunalikevirus, Pgonelikevirus, Pestivirus, Phipapillomavirus, Phic3unalikevirus, Phaeovirus, Picobirnavirus, Phie125likevirus, Phicbklikevirus, Plasmavirus, Phyllikevirus, Phieco32likevirus, Poacevirus, Phikmvlikevirus, Phihlikevirus, Polyomavirus, Phlebovirus, Phikzlikevirus, Potexvirus, Pipapillomavirus, Phytoreovirus, Proboscivirus, Plectrovirus, Piscihepevirus, Pseudovirus, Polemovirus, Pneumovirus, Punalikevirus, Pomovirus, Polerovirus, Potyvirus, Pospiviroid, Protoparvovirus, Prasinovirus, Prymnesiovirus, Psimunalikevirus, Psipapillomavirus, Quaranjavirus, Quadrivirus, Raphidovirus, Reylikevirus, Rhopapillomavirus, Reptarenavirus, Roseolovirus, Rhadinovirus, Rubulavirus, Rosadnavirus, Ranavirus, Rotavirus, Respirovirus, Rubivirus, Rudivirus, Rymovirus, Rhizidiovirus, Rosavirus, Salivirus, Sap6likevirus, Schizot4virus, Sadwavirus, Seadornavirus, Salmonivirus, Sequivirus, Sapelovirus, Siadenovirus, Sclerodarnavirus, Sakobuvirus, Sigmavirus, Semotivirus, Salterprovirus, Skunalikevirus, Sfi1unalikevirus, Sapovirus, Soymovirus, Sicinivirus, Scutavirus, Spiromicrovirus, Simplexvirus, Senecavirus, Spumavirus, Sobemovirus, Sfi21dtunalikevirus, Sp6likevirus, Sigmapapillomavirus, Spounalikevirus, Sirevirus, Suipoxvirus, Solendovirus, Spbetalikevirus, Sprivivirus, T4virus, Taupapillomavirus, Tepovirus, Thetapapillomavirus, T5likevirus, Tibrovirus, Tectivirus, Tobravirus, Teschovirus, T7likevirus, Torovirus, Thetatorquevirus, Tenuivirus, Totivirus, Tm4likevirus, Tetraparvovirus, Trichomonasvirus, Tombusvirus, Thogotovirus, Tunalikevirus, Torradovirus, Tobamovirus, Turncurtovirus, Tp2unalikevirus, Topocuvirus, Trichovirus, Tospovirus, Tungrovirus, Tremovirus, Twortlikevirus, Tritimovirus, Tupavirus, Tymovirus, Umbravirus, Upsilonpapillomavirus, Varicellovirus, Velarivirus, Vesiculovirus, Victorivirus, Vitivirus, Varicosavirus, Vesivirus, Viunalikevirus, Waikavirus, Wbetalikevirus, Whispovirus, Xp10likevirus, Xipapillomavirus, Yualikevirus, Yatapoxvirus, Zetapapillomavirus, Zetatorquevirus, and Zeavirus.

[0048] List 2: Viral Species:

West Nile Virus, dengue virus, tick-borne encephalitis virus, Japanese encephalitis virus, yellow fever virus, Zika virus, cell fusing agent virus, Palm Creek virus and/or Parramatta River virus. However, it should be understood that any other classification or taxonomic ranking of viruses is contemplated by the present disclosure.

[0049] Bacteria and fungi are also routinely classified or ranked based on different taxa corresponding to genus, family, and species identification. For example, fungal taxon contemplated by the disclosure include any of the fungal taxon provided in List 3 or List 4. It will be apparent to one of ordinary skill in the art that List 3 and List 4 are not exhaustive and is provided as an exemplary list.

[0050] List 3: Fungal Genera:

Anaeromyces, Caecomyces, Allomyces, Entyloma, Diskagma, Blastocladia, Funneliformis, Entylomella, Coelomomyces, Glomus (fungus), Fusidium, Heptameria, Holmiella, Homostegia, Hyalocrea, Hyalosphaera, Hypholoma, Hypobryon, Hysteropsis, Koordersiella, Karschia, Kirschsteiniothelia, Lembosiopeltis, Kullhemia, Kusanobotrys, Leptodothiorella, Lanatosphaera, Lasiodiplodia, Leveillina, Lepidopterella, Lepidostroma, Lollipopaia, Leptosphaerulina, Leptospora, Macrovalsaria, Lichenostigma, Licopolia, Massariola, Lopholeptosphaeria, Maireella, Microdothella, Macroventuria, Microcyclella, Mycoglaena, Melanodothis, Montagnella, Mycoporopsis, Moniliella, Mycopepon, Myriangium, Mycomicrothelia, Mycothyridium, Mytilostoma, Mycosphaerella, Mytilinidion, Neofusicoccum, Myriostigmella, Neocallimastix, Oomyces, Neopeckia, Orpinomyces, Ostreichnion, Ophiosphaerella, Paropodia, Passeriniella, Passerinula, Pedumispora, Peyronellaea, Phaeoacremonium, Phaeocyrtidula, Phaeoglaena, Phaeopeltosphaeria, Phaeoramularia, Phaeosperma, Phaneromyces, Phialophora, Philonectria, Phragmocapnias, Phragmosperma, Piedraia, Piromyces, Placocrea, Placostromella, Plagiostromella, Plejobolus, Pleostigma, Polychaeton, Pseudocercospora, Pseudocryptosporella, Pseudogymnoascus, Pseudothis, Pycnocarpon, Rhytidhysteron, Rhizophagus (fungus), Rhopographus, Rosellinula, Rhytisma, Robillardiella, Roussoëllopsis, Rosenscheldia, Rostafinskia, Sarcopodium, Savulescua, Saksenaeaceae, Scolecobonaria, Scolicotrichum, Schizoparme, Semifissispora, Septoria, Scorias, Sphaceloma, Sphaerellothecium, Spathularia, Stagonosporopsis, Stenella (fungus), Sphaerulina, Stigmina (fungus), Stioclettia, Stigmidium, Sydowia, Tephromela, Stuartella, Teichosporella, Thalloloma, Taeniolella, Thalassoascus, Togninia, Teratosphaeria, Thyrospora, Thyridaria, Yarrowia, Wettsteinina, Valsaria, Ustilaginoidea, Yoshinagella, Wernerella (fungus), and Vismya.

[0051] List 4: Fungi Species:

Absidia corymbifera, Absidia ramose, Achorion gallinae, Actinomadura spp., Ajellomyces dermatididis, Aleurisma brasiliensis, Allersheria boydii, Arthroderma spp., Aspergillus flavus, Aspergillus fumigatu, Basidiobolus spp, Blastomyces spp, Cadophora spp, Candida albicans, Cercospora apii, Chrysosporium spp, Cladosporium spp, Cladothrix asteroids, Coccidioides immitis, Cryptococcus albidus, Cryptococcus gattii, Cryptococcus laurentii, Cryptococcus neoformans, Cunninghamella elegans, Dematium wernecke, Discomyces israelii, Emmonsia spp, Emmonsiella capsulate, Endomyces geotrichum, Entomophthora coronate, Epidermophyton floccosum, Filobasidiella neoformans, Fonsecaea spp., Geotrichum candidum, Glenospora khartoumensis, Gymnoascus gypseus, Haplosporangium parvum, Histoplasma, Histoplasma capsulatum, Hormiscium dermatididis, Hormodendrum spp., Keratinomyces spp, Langeronia soudanense, Leptosphaeria senegalensis, Lichtheimia corymbifera, Lobmyces loboi., Loboa loboi, Lobomycosis, Madurella spp., Malassezia furfur, Micrococcus pelletieri, Microsporum spp, Monilia spp., Mucor spp., Mycobacterium tuberculosis, Nannizzia spp., Neotestudina rosatii, Nocardia spp., Oidium albicans, Oospora lactis, Paracoccidioides brasiliensis, Petriellidium boydii, Phialophora spp., Piedraia hortae, Pityrosporum furfur, Pneumocystis jirovecii (or Pneumocystis carinii), Pullularia gougerotii, Pyrenochaeta romeroi, Rhinosporidium seeberi, Sabouraudites (Microsporum), Sartorya fumigate, Sepedonium, Sporotrichum spp., Stachybotrys, Stachybotrys chartarum, Streptomyce spp., Tinea spp., Torula spp, Trichophyton spp, Trichosporon spp, and Zopfia rosatii.

[0052] Additionally, bacterial taxon contemplated by the disclosure include any of the bacterial taxon provided in List 5 or List 6. It will be apparent to one of ordinary skill in the art that List 5 and List 6 are not exhaustive and is provided as an exemplary list.

[0053] List 5: Bacterial Genera:

Heliobacter, Aerobacter, Rhizobium, Agrobacterium, Bacillus, Clostridium, Pseudomonas, Xanthomonas, Nitrobacteriaceae, Nitrobacter, Nitrosomonas, Thiobacillus, Spirillum, Vibrio, Bacteroides, Corynebacterium, Listeria, Escherichia, Klebsiella, Salmonella, Serratia, Shigella, Erwinia, Rickettsia, Chlamydia, Mycoplasma, Actinomyces, Streptomyces, Mycobacterium, Polyangium, Micrococcus, Staphylococcus, Lactobacillus, Diplococcus, Streptococcus, and Campylobacter.

[0054] List 6: Bacterial Species:

Actinomyces israelii, Bacillus anthraces, Bacillus cereus, Bartonella henselae, Bartonella quintana, Bordetella pertussis, Borrelia burgdorferi, Borrelia garinii, Borrelia afzelii, Borrelia recurrentis, Brucella abortus, Brucella canis, Brucella melitensis, Brucella suis, Campylobacter jejuni, Chlamydia pneumoniae, Chlamydia trachomatis, Chlamydophila psittaci, Clostridium botulinum, Clostridium difficile, Clostridium perfringens, Clostridium tetani, Corynebacterium diphtheriae, Enterococcus faecalis, Enterococcus faecium, Escherichia coli, Francisella tularensis, Haemophilus influenzae, Helicobacter pylori, Legionella pneumophila, Leptospira interrogans, Leptospira santarosai, Leptospira weilii, Leptospira noguchii, Listeria monocytogenes, Mycobacterium leprae, Mycobacterium tuberculosis, Mycobacterium ulcerans, Mycoplasma pneumoniae, Neisseria gonorrhoeae, Neisseria meningitidis, Pseudomonas aeruginosa, Rickettsia rickettsia, Salmonella typhi, Salmonella typhimurium, Shigella sonnei, Staphylococcus aureus, Staphylococcus epidermidis, Staphylococcus saprophyticus, Streptococcus agalactiae, Streptococcus pneumoniae, Streptococcus pyogenes, Treponema pallidum, Ureaplasma urealyticum, Vibrio cholerae, Yersinia pestis, Yersinia enterocolitica, and Yersinia pseudotuberculosis.

[0055] With respect to the term “different taxon of pathogens”, the term is distinct from the “particular taxon of pathogens”. Here, the different taxon of pathogenic microorganisms does not overlap with the particular taxon of pathogens. For example, if a particular taxon of pathogenic microorganisms includes the family of Flavivirus, the different taxon of pathogenic microorganisms does not include Flavivirus but can include another family of viruses, such as Alphaviruses, bacterial, fungal, archaea, algal, protozoan, and/or parasitic pathogens. If the particular taxon of pathogenic microorganisms and different taxon of pathogenic microorganisms are from the same domain (e.g., bacterial domain), the two taxa identified by the method are distinct.

[0056] As used herein, the term “sample” refers to a sample collected from a subject including, but not limited to, human and non-human animal subjects, that may be affected by or are suspected of infection by a pathogen (e.g., an infectious virus, bacterium, protozoa, prion, fungi, algae, parasite or other microbe). The term also includes samples collected from the environment including, but not limited to, surface samples, water samples, soil samples and the like. A sample includes but is not limited to, a cell, cell lysate, isolated DNA, isolated RNA, tissue section, tissue biopsy, liquid biopsy, blood, or other biological fluid (e.g., cerebrospinal fluid) obtained from a subject. A sample includes blood samples (e.g., whole peripheral blood, serum or plasma), tissue samples (e.g., fresh, frozen or Fixed Formalin Paraffin Embedded (FFPE) samples, biopsy samples (e.g., fine needle aspirates (FNAs)), excretions and secretions such as, saliva, sputum, urine, stool, plasma/serum, breast milk, sperm, semen, vaginal secretions, sweat, mucus, bile, and oral and genital mucosal swabs. The sample can include a clinical sample (e.g., a patient sample) for the purpose of diagnosis, detection, epidemiology, treatment, disease monitoring, and the like. In some instances, the sample comprises isolated RNA and/or DNA from a mammal (e.g., pig, cow, goat, sheep, rodent, rat, mouse, dog, cat, non-human primate or human). A tissue sample typically includes one or more cells obtained from a tissue of the subject or cells derived from a tissue obtained from the subject (e.g., cells in tissue culture). It will be apparent to one of ordinary skill in the art that a tissue sample can include cells obtained from a somatic tissue (e.g., liver, kidney, spleen, gall bladder, stomach, bladder, uterus, intestines, pancreas, colon, lung, heart, brain, muscle, bone, pharynx and larynx).

[0057] As used herein, the term “subject” refers to any member of the class animals, including, without limitation, humans and other primates, including non-human primates such as rhesus macaques, chimpanzees and other monkey and ape species; farm animals, such as cattle, sheep, pigs, goats and horses; domestic mammals, such as dogs and cats; laboratory animals, including rabbits, mice, rats and guinea pigs; birds and other reptiles, including domestic, wild, and game birds, such as chickens, turkeys, geese, ducks, lizards, alligators, and snakes; amphibians, including frogs, toads, salamanders, and newts; fish, such as salmon, and tilapia; and insects. The term does not denote a particular age or gender. Thus, adult, young, and newborn subjects are intended to be included as well as male and female subjects. In most instances, the subject is a host to the pathogen and the pathogen may rely on its ability to infect the host, for example the production of toxins, to enter cells and tissues within the host, and acquire host nutrients to maintain infectiousness. The term includes subjects who are experiencing or have experienced illness or disease associated with a particular taxon of pathogenic microorganisms or subjects who are infected (or suspected of being infected) with a particular taxon of pathogen but are not experiencing or demonstrating symptoms of illness or disease associated with the pathogen.

[0058] As used herein, a “target” refers to a molecule of interest to be detected in a sample. In some embodiments, the target is a nucleic acid molecule. In a one embodiment, the target is a target DNA, target RNA or target nucleic acid from a pathogen. In some embodiments, the target is a polynucleotide, such as dsDNA or ssDNA; RNA, such as ssRNA or dsRNA, or a DNA-RNA hybrid. In some embodiments, two or more target molecules are detected in a single sample. In some embodiments, the two or more target molecules may be related to each other (e.g., nucleic acids from the same taxon, genus or species of pathogens). In another embodiment, a first target molecule is from a first taxon of pathogenic microorganisms and a second target molecule is from a second taxon of pathogens. In some embodiments, the target nucleic can be from the host subject and not a pathogen.

[0059] In some instances, a target sequence or target nucleic acid molecule refers to a region, subsequence, or complete nucleic acid molecule which is to be amplified (e.g., RNA to cDNA, or amplification of DNA) or detected using the method, kits and compositions disclosed herein. Accordingly, amplification of one or more target sequences can include detection of one or more pathogenic microorganisms in a single sample from a subject, such as but not limited to, the detection and/or identification of a co-infection in the sample from the subject. For example, a clinical sample from a subject (e.g., a serum or urine sample from a human subject) can be evaluated for the presence (or absence) of an amplified target sequence present in the genome of a virus or bacterium. Identification of two target sequences from distinct taxa from different domains (e.g., bacterial and viral domains) would be indicative that the subject is infected by both pathogenic microorganisms (e.g., a viral pathogen and a bacterial pathogen). Identification of the target sequence in the sample can be useful for the modulation of the form, dosage, or regime of treatment for the subject affected by the pathogen.

[0060] As used herein, the terms “treatment” and “treating” and the like, refer to methods or compositions for amelioration of disease or illness including any objective or subjective parameter such as abatement; remission; diminishing of symptoms or delaying the onset of symptoms; slowing in the rate of degeneration or decline; making the final point of degeneration less debilitating; and/or improving a subject's physical or mental well-being.

[0061] As used herein, the term “amplifying” refers to the process of synthesizing nucleic acid molecules that are complementary to one (or both strands) of a template nucleic acid molecule (e.g., nucleic acid molecules from the Zika virus genome). Amplifying a nucleic acid molecule typically includes denaturing the template nucleic acid, particularly if the template nucleic acid is double-stranded, annealing primers to the template nucleic acid at a temperature that is below the melting temperatures of the primers, and enzymatically elongating from the primers to generate an amplification product. Generally, synthesis initiates at the 3′ end of a primer and proceeds in a 5′ to 3′ direction along the template nucleic acid strand. Amplification typically requires the presence of deoxyribonucleoside triphosphates, a polymerase enzyme (e.g., DNA or RNA polymerase or T7 for in vitro transcription in TMA) and an appropriate buffer and/or co-factors for optimal activity of the polymerase enzyme (e.g., MgCl₂ and/or KCl).

[0062] As used herein, the term “primer” refers to oligomeric compounds, primarily to oligonucleotides containing naturally occurring nucleotides such as adenine, guanine, cytosine, thymine and/or uracil, but may also include modified oligonucleotides (e.g., modified nucleotides, nucleosides, synthetic nucleotides having modified base moieties and/or modified sugar moieties (See, Protocols for Oligonucleotide Conjugates, Methods in Molecular Biology, Vol 26, (Sudhir Agrawal, Ed., Humana Press, Totowa, N.J., (1994)); and Oligonucleotides and Analogues, A Practical Approach (Fritz Eckstein, Ed., IRL Press, Oxford University Press, Oxford) that are able to prime DNA synthesis by an enzyme, typically in a template-dependent manner, i.e., the 3′ end of the primer provides a free 3′-OH group to which further nucleotides are attached by the enzyme (e.g., DNA polymerase or reverse transcriptase) establishing a 3′ to 5′ phosphodiester linkage whereby deoxynucleoside triphosphates are used and pyrophosphate is released. Oligonucleotides can be prepared by any suitable method, including, for example, cloning and restriction of appropriate sequences and direct chemical synthesis by a method such as the phosphotriester method of Narang et al., 1979, Meth. Enzymol. 68:90-99; the phosphodiester method of Brown et al., 1979, Meth. Enzymol. 68:109-151; the diethylphosphoramidite method of Beaucage et al., 1981, Tetrahedron Lett. 22:1859-1862; and the solid support method of U.S. Pat. No. 4,458,066. A review of synthesis methods is provided in Goodchild, 1990, Bioconjugate Chemistry 1(3):165-187.

[0063] A primer is typically a single-stranded deoxyribonucleic acid. The appropriate length of a primer depends on the intended use of the primer but typically ranges from 6 to 50 nucleotides. Short primer molecules (e.g., having a length within a range of 11-17 nucleotides) generally require cooler temperatures to form sufficiently stable hybrid complexes with a template nucleic acid. The design of suitable primers for the amplification of a given target nucleic acid sequence is well known in the art and publicly available software such as, but not limited to, Primer3, NetPrimer, can be used to input a target sequence of interest to obtain optimized primer(s) to reduce off-target or secondary structure considerations.

[0064] As used herein, “hybridization”, “hybridizing”, “anneal” and “annealing”, and the like, refer to a process of combining two complementary (or substantially complementary (i.e., at least 90%) single-stranded DNA or RNA molecules so as to form a single, double-stranded molecule (DNA/DNA, DNA/RNA, RNA/RNA) through conventional hydrogen base pairing. Hybridization stringency is typically determined by the hybridization temperature and salt concentration of the hybridization buffer; e.g., high temperature and low salt provide high stringency hybridization conditions. Examples of salt concentration ranges and temperature ranges for different hybridization conditions are as follows: high stringency, approximately 0.01 M to approximately 0.05 M salt, hybridization temperature 5° C. to 10° C. below Tm; moderate stringency, approximately 0.16 M to approximately 0.33 M salt, hybridization temperature 20° C. to 29° C. below Tm; and low stringency, approximately 0.33 M to approximately 0.82 M salt, hybridization temperature 40° C. to 48° C. below Tm of duplex nucleic acids is calculated by standard methods well-known in the art (see, e.g., Maniatis, T., et al., Molecular Cloning: A Laboratory Manual, Cold Spring Harbor Laboratory Press: New York (1982); Casey, J., et al., Nucleic Acids Research 4:1539-1552 (1977); Bodkin, D. K., et al., Journal of Virological Methods 10(1):45-52 (1985); Wallace, R. B., et al., Nucleic Acids Research 9(4):879-894 (1981)). Algorithm prediction tools to estimate Tm are also publicly available (see, e.g., [http://] [tmcalculator.neb.com]). High stringency conditions for hybridization typically refer to conditions under which a nucleic acid molecule having complementarity (or substantial complementarity, e.g., greater than 90%, 95%, 98%, 99% complementarity) to a target sequence predominantly hybridizes with the target sequence and does not hybridize to non-target or off-target sequences.

[0065] In some embodiments, hybridizing refers to the annealing of a primer to a complementary (or substantially complementary (i.e., greater than 90% complementary)) RNA or DNA sequence obtained from a pathogen. In another embodiment, hybridizing can include annealing at least one probe to an amplification product (e.g., cDNA molecule) derived from a pathogen. Hybridization conditions typically include a temperature below the melting temperature of the primers or probes to reduced non-specific hybridization of the primers/probes. Accordingly, in some embodiments of the disclosure, hybridization conditions are of moderate stringency or high stringency.

[0066] As used herein, the term “thermostable polymerase” refers to a polymerase enzyme that is heat stable, i.e., the enzyme catalyzes the formation of a primer extension product complementary to a template nucleic acid, and is not irreversibly denatured when subjected to elevated temperatures for the time needed to effect denaturation of double-stranded template nucleic acids (e.g., between 95° C.-99° C.). Thermostable polymerases have been isolated from Thermus flavus, T. ruber, T. thermophilus, T. aquaticus, T. lacteus, T. rubens, Bacillus stearothermophilus, and Methanothermus fervidus. Additionally, polymerases that are not thermostable can be employed in the PCR assays disclosed herein, for example by replenishing the polymerase between synthesis/extension and denaturation steps as it becomes denatured. Any polymerase or thermostable polymerase known in the art is suitable for use in the method disclosed herein.

[0067] As used herein, the term “complement thereof” or “complementary” refers to a nucleic acid molecule that is optionally the same length as a target molecule of interest and possesses a structural (e.g., nucleotide) composition that is complementary (i.e., capable of conventional hydrogen base pairing) with the target molecule of interest, unless otherwise specified. Substantial complementarity refers to a nucleic acid molecule that is optionally the same length as the target molecule of interest but is greater than 90% complementary and less than 100% complementary to the target molecule of interest.

[0068] As used herein, the terms “extension”, “extend” or “elongation” when used with respect to nucleic acid molecules refers to a biological process by which additional nucleotides (or nucleotide analogs) are incorporated into nucleic acid molecules. For example, a nucleic acid can be extended by a nucleotide incorporating enzyme, such as a polymerase or reverse transcriptase that typically adds sequentially, a nucleotide to the 3′ terminal end of the nucleic acid molecule (e.g., the freely available 3′-OH group).

[0069] As used herein, the terms “identical” or “percent identity” in the context of two or more nucleic acid sequences, refers to two or more sequences that are the same or have a specified percentage of nucleotides that are the same (i.e., identical), when compared and aligned for maximum correspondence, e.g., as measured using one of the sequence comparison algorithms or by visual inspection. An exemplary algorithm that is suitable for determining percent sequence identity and sequence similarity is the BLAST program, which are described in Altschul et al. (1990) “Basic local alignment search tool” J. Mol. Biol. 215:403-410, Gish et al. (1993) “Identification of protein coding regions by database similarity search” Nature Genet. 3:266-272, Madden et al. (1996) “Applications of network BLAST server” Meth. Enzymol. 266:113-141, Altschul et al. (1997) “Gapped BLAST and PSI-BLAST: a new generation of protein database search programs” Nucleic Acids Res. 25:3389-3402, and Zhang et al. (1997) “PowerBLAST: A new network BLAST application for interactive or automated sequence analysis and annotation” Genome Res. 7:649-656.

[0070] Other exemplary multiple sequence alignment computer programs include MAFFT ([https://] [mafft.cbrc.jp/alignment/software/]), MUSCLE ([https://] [www.ebi.ac.uk/Tools/msa/muscle/]), and CLUSTALW ([https://] [www.ebi.ac.uk/Tools/msa/clustalw2/]). Percent identity between two nucleic acid sequences is generally calculated using standard default parameters of the various methods or computer programs. A high degree of sequence identity, as used herein, between two nucleic acid molecules is typically at least 90% identity, at least 91% identity, at least 92% identity, at least 93% identity, at least 94% identity, at least 95% identity, at least 96% identity, at least 97% identity, at least 98% identity, at least 99% identity, at least 99.5% identity, or any range of percent identity that includes or is between any two of the foregoing percentages (e.g., between 90% identity and 100% identity, between 95% identity and 98% identity, etc.). A moderate degree of sequence identity, as used herein, between two nucleic acid molecules is typically at least 80% identity, at least 82% identity, at least 83% identity, at least 84% identity, at least 85% identity, at least 86% identity, at least 87% identity, at least 88% identity, at least 89% identity, or any range of percent identity that includes or is between any two of the foregoing percentages (e.g., between 80% identity and 90% identity, between 85% identity and 89% identity, etc.). A low degree of sequence identity, as used herein, between two nucleic acid molecules is typically at least 50% identity, at least 55% identity, at least 60% identity, at least 65% identity, at least 70% identity, at least 75% identity, at least 79% identity, or any range of percent identity that includes or is between any two of the foregoing percentages (e.g., between 50% identity and 70% identity, 55% identity and 75% identity). For example, a sample from a subject, (e.g., suspected of being infected with Zika virus) can have a high degree of sequence identity to a reference taxon of pathogenic microorganisms (e.g., Flavivirus) and a low degree of sequence identity to bacterial pathogenic microorganisms (e.g., Streptococcus, Clostridium, Salmonella and Mycobacterium).

[0071] As used herein, the terms “nucleic acid”, “polynucleotide” and “oligonucleotide” refer to a polymeric form of nucleotides. The nucleotides may be deoxyribonucleotides (DNA), ribonucleotides (RNA), analogs thereof, or combinations thereof, and may be of any length. Polynucleotides may perform any function and may have any secondary and tertiary structures (e.g., hairpins, stem loop structures). Oligonucleotides refer to polymeric form of nucleotides typically having much shorter lengths than polynucleotides (e.g., <50 nt). The terms encompass known analogs of natural nucleotides and nucleotides that are modified in the base, sugar and/or phosphate moieties. Preferably, analogs of a particular nucleotide have the same base-pairing specificity (e.g., an analog of A base pairs with T). An oligonucleotide may comprise one modified nucleotide or multiple modified nucleotides. Examples of modified nucleotides include fluorinated nucleotides, methylated nucleotides, and nucleotide analogs. The nucleotide structure may be modified before or after a polymer is assembled. The terms also encompass nucleic acids comprising modified backbone residues or linkages that are synthetic, naturally occurring, and non-naturally occurring, and have similar binding properties as a reference polynucleotide (e.g., DNA or RNA). Examples of such analogs include, but are not limited to, phosphorothioates, phosphoramidates, methyl phosphonates, chiral-methyl phosphonates, 2-O-methyl ribonucleotides, peptide-nucleic acids (PNAs), Locked Nucleic Acid (LNA) and morpholino structures.

[0072] As used herein, a “modified nucleotide” or “nucleotide analog” in the context of an oligonucleotide, primer or probe, refers to incorporation of a non-naturally occurring nucleotide (e.g., a nucleotide other than A, G, T, C or U) within the oligonucleotide, primer or probe, and whereby incorporation of the modified nucleotide or nucleotide analog does not hinder or prevent nucleic acid extension or elongation under suitable amplification conditions. Examples of nucleic acid modifications are described in, e.g., U.S. Pat. No. 6,001,611. Other modified nucleotide substitutions may alter the stability of the oligonucleotide (e.g., modulate its Tm), or provide other desirable features (e.g., nuclease resistance).

[0073] As used herein, a “reagent” refers broadly to any agent used in a reaction, other than the analyte (e.g., nucleic acid molecule being analyzed). Illustrative reagents for a nucleic acid amplification reaction or sequencing assay include, but are not limited to, buffer, metal ions, polymerase, reverse transcriptase, primers, probes, template nucleic acid, nucleotides, labels, dyes, nucleases, adapters, oligo-coated beads, microparticles or droplets, and the like. Generally, reagents for enzymatic reactions include, for example, substrates, cofactors, buffers, metal ions, inhibitors, and/or activators.

[0074] The disclosure also provides embodiments directed to dehosting a sample prior to the identification of a taxon or taxa of pathogenic microorganisms in a sample. Such dehosting techniques and compositions relate to the selective cleavage of non-microbial nucleic acids in a sample containing both pathogen-based nucleic acids and non-pathogen-based nucleic acids (e.g., nucleic acids from a subject), so that the sample becomes greatly enriched with microbial nucleic acids. Examples of dehosting methods include those described in Feehery et al., PLoS ONE 8:e76096 (2013); Sachse et al., Journal of Clinical Microbiology 47:1050-1057 (2009); Barnes et al., PLoS ONE 9(10):e109061 (2014); Leichty et al., Genetics 198(2):473-81 (2014)); Hasan et al., J Clin Microbiol 54(4):919-27 (2016); and Liu et al., PLoS ONE 11(1):e0146064 (2016). Additionally, commercial kits for carrying out dehosting are also available, including the NEBNext Microbiome DNA Enrichment™ Kit, the Molzym MolYsis Basic™ kit, and MICROBEEnrich™ Kit.

[0075] In some embodiments, the dehosting methods and compositions disclosed herein takes advantage of properties associated with non-pathogen-based nucleic acids, including methylation at CpG residues, and associations with DNA-binding proteins, such as histones. For example, in a particular embodiment the dehosting methods and compositions can utilizes a nucleic acid binding protein that selectively binds with non-pathogen-based nucleic acids (e.g., histones, restriction enzymes). In a further embodiment, the dehosting methods and compositions can comprise a recombinant protein that selectively binds with non-pathogen-based nucleic acids, and which also selectively degrades non-pathogen-based nucleic acids, i.e., the recombinant protein comprises both a nonmicrobial nucleic acid binding domain and a nuclease domain. In a particular embodiment, the nucleic acid binding protein is a histone. Histones are found in the nuclei of eukaryotic cells, and in certain Archaea, namely Thermoproteales and Euryarchaea, but not in bacteria or viruses. In a further embodiment, histone bound non-pathogen-based nucleic acids can then be removed from the sample by use of a substrate which comprises an affinity agent that selectively binds to a histone protein, i.e., a histone-binding domain. Examples of affinity agents that can bind to a histone protein include, but are not limited to, chromodomain, Tudor, Malignant Brain Tumor (MBT), plant homeodomain (PHD), bromodomain, SANT, YEATS, Proline-Tryptophan-Tryptophan-Proline (PWWP), Bromo Adjacent Homology (BAH), Ankryin repeat, WD40 repeat, ATRX-DNMT3A-DNMT3L (ADD), or zn-CW. In another embodiment, the histone-binding domain can include a domain which specifically binds to a histone from a protein such as HAT1, CBP/P300, PCAF/GCNS, TIP60, HB01 (ScESA1, SpMST1), ScSAS3, ScSAS2 (SpMST2), ScRTT109, SirT2 (ScSir2), SUV39H1, SUV39H2, G9a, ESET/SETDB1, EuHMTase/GLP, CLL8, SpClr4, MLL1, MLL2, MLL3, MLL4, MLL5, SET1A, SET1B, ASH1, Sc/Sp SET1, SET2 (Sc/Sp SET2), NSD1, SYMD2, DOT1, Sc/Sp DOT1, Pr-SET 7/8, SUV4 20H1, SUV420H2, SpSet 9, EZH2, RIZ1, LSD1/BHC110, JHDM1a, JHDM1b, JHDM2a, JHDM2b, JMJD2A/JHDM3A, JMJD2B, JMJD2C/GASC1, JMJD2D, CARM1, PRMT4, PRMT5, Haspin, MSK1, MSK2, CMI, Mstl, Bmi/RinglA, RNF20/RNF40, or ScFPR4, or a histone-binding fragment thereof.

[0076] In additional embodiment, the disclosure also provides for a nucleic acid binding protein or nucleic acid binding domain that selectively binds to DNA that comprises a methylated CpG. CG dinucleotide motifs (“CpG sites” or “CG sites”) are found in regions of DNA where a cytosine nucleotide is followed by a guanine nucleotide in the linear sequence of bases along its 5′ to 3′ direction. CpG islands (or CG islands) are regions with a high frequency of CpG sites. CpG is shorthand for 5′-C-phosphate-G-3′, that is, cytosine and guanine separated by one phosphate. Cytosines in CpG dinucleotides can be methylated to form 5-methylcytosine. Cytosine methylation occurs throughout the human genome at many CpG sites. Cytosine methylation at CG sites also occurs throughout the genomes of other eukaryotes. In mammals, for example, 70% to 80% of CpG cytosines may be methylated. In pathogenic microorganisms of interest, such as bacteria and viruses, this CpG methylation does not occur or is significantly lower than the CpG methylation in the human genome. Thus, dehosting can be achieved by selectively cleaving CpG methylated DNA.

[0077] In some embodiments, the disclosure provides for a dehosting method which comprises a nucleic acid binding protein or binding domain which binds to CpG islands or CpG sites. In another embodiment, the binding domain comprises a protein or fragment thereof that binds to methylated CpG islands. In yet another embodiment, the nucleic acid binding protein binding domain comprises a methyl-CpG-binding domain (MBD). An example of an MBD is a polypeptide of about 70 residues that folds into an alpha/beta sandwich structure comprising a layer of twisted beta sheet, backed by another layer formed by the alpha1 helix and a hairpin loop at the C terminus. These layers are both amphipathic, with the alpha1 helix and the beta sheet lying parallel and the hydrophobic faces tightly packed against each other. The beta sheet is composed of two long inner strands (beta2 and beta3) sandwiched by two shorter outer strands (beta1 and beta4). In a further embodiment, the nucleic acid binding protein or binding domain comprises a protein selected from the group consisting of MECP2, MBD1, MBD2, and MBD4, or a fragment thereof. In yet a further embodiment, the nucleic acid binding protein or binding domain comprises MBD2. In a certain embodiment, the nucleic acid binding protein or binding domain comprises a fragment of MBD2. In another embodiment, the nucleic acid binding protein or binding domain comprises MBD5, MBD6, SETDB1, SETDB2, TIP5/BAZ2A, or BAZ2B, or a fragment thereof. In yet another embodiment, the nucleic acid binding protein or binding domain comprises a CpG methylation or demethylation protein, or a fragment thereof. In a further embodiment, CpG bound nonmicrobial nucleic acids can then be removed from the sample by use of a substrate which comprises an affinity agent that selectively binds to a nucleic acid binding protein or binding domain which binds to CpG islands or CpG sites. Examples of affinity agents include antibodies or antibody fragments that selectively bind to a nucleic acid binding protein or binding domain which binds to CpG islands or CpG sites. Affinity agents comprising antibodies or antibody fragments can be bound to a substrate or alternatively may itself be bound by a second antibody which is bound to a substrate, thereby providing a means to separate and remove the nonmicrobial nucleic acids from a sample.

[0078] In another embodiment the disclosure provides for dehosting method that uses a nuclease, or a recombinant protein which comprises a nuclease domain, whereby the nuclease cleaves non-pathogen-based nucleic acids into fragments. In the latter case, the recombinant protein may also comprise a nucleic acid protein binding domain having activity for nucleic acid binding proteins (e.g., histones, methyl-CpG-binding proteins). The nuclease or nuclease can include, but are not limited to, a non-specific nuclease, an endonuclease, non-specific endonuclease, non-specific exonuclease, a homing endonuclease, and restriction endonuclease. In another embodiment, the nuclease domain is derived from any nuclease where the nuclease or nuclease domain does not itself have its own unique target. In yet another embodiment, the nuclease domain has activity when fused to other proteins. Examples of non-specific nucleases include FokI and I-TevI. In some embodiments, the nuclease domain is FokI or a fragment thereof. In a further embodiment, the nuclease domain is I-TevI or a fragment thereof. In yet a further embodiment, the FokI or I-TevI or fragment thereof is unmutated and/or wild-type. Further examples of nucleases include but are not limited to, Deoxyribonuclease I (DNase I), RecBCD endonuclease, T7 endonuclease, T4 endonuclease IV, Bal 31 endonuclease, endonucleaseI (endo I), Micrococcal nuclease, Endonuclease II (endo VI, exo III), Neurospora endonuclease, S1-nuclease, P1-nuclease, Mung bean nuclease I, Ustilago nuclease (Dnase I), AP endonuclease, and Endo R.

[0079] As used herein, “Polymerase Chain Reaction (PCR)” refers to a process in which one or more nucleic acid molecules are amplified typically through the use of one or more primers under suitable amplification conditions. PCR is described in U.S. Pat. Nos. 4,683,195; 4,683,202; and 4,965,188; Saiki et al., 1985, Science 230:1350-1354; Mullis et al., 1986, Cold Springs Harbor Symp. Quant. Biol. 51:263-273; and Mullis and Faloona, 1987, Methods Enzymol. 155:335-350. The development and application of PCR are described extensively in the literature. For example, a range of PCR-related topics are discussed in PCR Technology—principles and applications for DNA amplification, 1989, (ed. H. A. Erlich) Stockton Press, New York; PCR Protocols: A guide to methods and applications, 1990, (ed. M. A. Innis et al.) Academic Press, San Diego; and PCR Strategies, 1995, (ed. M. A. Innis et al.) Academic Press, San Diego. Commercial vendors, such as ThermoFisher Scientific (Waltham, Conn.) market PCR reagents and publish PCR protocols.

[0080] PCR typically employs two oligonucleotide primers, commonly referred to in the art as a primer pair (a forward and reverse primer) that hybridize to a template nucleic acid (e.g., DNA or RNA molecule). Primers useful in some embodiments of the disclosure include oligonucleotides capable of acting as points of initiation of nucleic acid synthesis of a pathogen's genome or expressed polynucleotides (e.g., Zika virus nucleic acid sequences, e.g. one or more of the genome sequences provided in GenBank Accession numbers MF434516-MF434522 and MF801377-MF801426). Primers for PCR are typically single-stranded for maximum efficiency during amplification. Additionally, primers are often denatured, i.e., treated to promote linear, single-stranded primers in the amplification reaction. One method of denaturing primers is by heating (e.g., heating at 95° C. for 3-5 minutes). Although SEQ ID NOs: 1-96, 399-1562, 1563-3553, and 3554-7324 include both forward and reverse primers, a single primer from a particular table can be used in the methods of the disclosure so long as there is a second, e.g., universal primer or other primer oligonucleotide present.

[0081] If the template nucleic acid to be amplified is double-stranded, it is often needed to separate the two strands before it can be used as a template in PCR. Strand separation can be accomplished by any suitable denaturing methods known in the art including physical, chemical or enzymatic means. One method of separating the nucleic acid strands involves heating the nucleic acid until it is predominately denatured (e.g., greater than 50%, 60%, 70%, 80%, 90% or 95% denatured). The heating conditions needed for denaturing template nucleic acids will depend, e.g., on the buffer salt concentration and the length and nucleotide composition of the nucleic acids being denatured, but typically ranges from about 90° C. to about 100° C. for a time depending on features of the reaction, such as but not limited to, melting temperature and nucleic acid length.

[0082] If the double-stranded template nucleic acid is denatured by heat, the reaction mixture is often allowed to cool to a temperature that promotes annealing of each primer to its target sequence. The temperature for annealing is usually from about 35° C. to about 65° C. (e.g., about 40° C. to about 60° C., about 45° C. to about 50° C.). Annealing times can be from about 10 sec to about 1 min (e.g., about 20 sec to about 50 sec; about 30 sec to about 40 sec). The reaction mixture is then adjusted to a temperature at which the activity of the polymerase or reverse transcriptase is promoted or optimized, i.e., a temperature sufficient for nucleic acid extension to occur from the annealed primer to generate amplification products complementary to the template nucleic acid. The temperature should be sufficient to synthesize an extension/amplification product from each primer that is annealed to a nucleic acid template, but should not be so high as to denature an extension product from its complementary template (e.g., the temperature for extension generally ranges from about 40° C. to about 80° C. (e.g., about 50° C. to about 70° C.; or about 60° C.). Extension times can be from about 10 sec to about 5 min (e.g., about 30 see to about 4 min; about 1 min to about 3 min; about 1 min 30 sec to about 2 min).

[0083] Since its inception, various amplification techniques have been described as variants or derivatives of PCR including, but not limited to, Ligase Chain Reaction (LCR, Wu and Wallace, 1989, Genomics 4:560-569 and Barany, 1991, Proc. Natl. Acad. Sci. USA 88:189-193); Polymerase Ligase Chain Reaction (Barany, 1991, PCR Methods and Applic. 1:5-16); Gap-LCR (PCT Patent Publication No. WO 90/01069); Repair Chain Reaction (European Patent Publication No. 439,182 A2), 3SR (Kwoh et al., 1989, Proc. Natl. Acad. Sci. USA 86:1173-1177; Guatelli et al., 1990, Proc. Natl. Acad. Sci. USA 87:1874-1878; PCT Patent Publication No. WO 92/0880A), NASBA (U.S. Pat. No. 5,130,238), Nested-Patch PCR (Varley and Mitra, (2008) Genome Research, 18:1844-50), asymmetric PCR (Wooddell & Burgess, (1996) Genome Research, 6:886-892), anchored PCR (Loh, (1991) Methods, 2, 1:11-19) inverse PCR (Ochman et al., (1988) Genetics, 120 (3):621-23), real-time quantitative PCR (Real Time-PCR) or quantitative PCR (qPCR) (Watson et al., (2004). Molecular Biology of the Gene (Fifth ed.). San Francisco: Benjamin Cummings), transcription based amplification system (TAS), strand displacement amplification (SDA), rolling circle amplification (RCA), hyper-branched RCA (HRCA) and Rapid Amplification of cDNA ends (RACE) (Lagarde et al., (2016), Nat. Comm., 7:1233. Additionally, digital PCR is a technique that that allows quantitative measurement of the number of target molecules in a sample. The basic premise is to divide a large sample into a number of smaller subvolumes (partitioned volumes), whereby the subvolumes contain on average a low number or single copy of target. By counting the number of successful amplification reactions in the subvolumes, one can deduce the starting copy number of the target molecule in the starting volume (U.S. Pat. No. 8,722,334).

[0084] Methods to reduce non-specific hybridization and amplification of off-target sequences have been improved through the application of “hot-start” techniques. A hot-start method typically involves an initial high (e.g., 95° C.-100° C.) incubation temperature step, after which one or more important reagents for amplification are added to the reaction mixture (e.g., MgCl₂ or deoxyribonucleotides (dNTPs)). By raising the reaction mixture temperature prior to the introduction of at least one amplification reagent a reduction in self-forming secondary structures, reduction in non-specific cross-linking, and a reduction in primer dimers can be achieved. Another method of reducing the formation of non-specific amplification products relies on heat-reversible inhibition of DNA polymerase by DNA polymerase-specific antibodies, as described in U.S. Pat. No. 5,338,671. The antibodies are incubated with a DNA polymerase in a buffer at room temperature prior to the assembly of the reaction mixture in order to allow formation of the antibody-DNA polymerase complex. Antibody inhibition of the DNA polymerase activity is inactivated by a high temperature incubation step prior to amplification.

[0085] Each cycle of PCR typically comprises three steps: denaturation, annealing, and synthesis; the method frequently involves about 15 to about 30 cycles and is routinely automated using a thermocycler. The steps of denaturation, annealing, and synthesis can be repeated as often as needed to produce the desired quantity of amplification products (e.g., corresponding to a required amount of target molecules). Often, the limiting factors in the amplification reaction are the amounts of primers, thermostable enzyme(s), and nucleoside triphosphates present in the reaction. The cycling steps (i.e., denaturation, annealing, and extension) are typically repeated at least once. The number of cycling steps will depend on the nature of the sample and/or the frequency of the target molecules in the sample. If the target molecule (e.g., Zika virus genome copies or other pathogen genome) is present in low numbers in a complex mixture of nucleic acids (e.g., a blood sample from a host), more cycling steps may be required to amplify the target molecule to a point where the amount of amplified product is sufficient for detection by the method.

[0086] PCR allows for rapid and specific diagnosis of infectious diseases, including those caused by bacteria or viruses. PCR also permits identification of non-cultivatable or slow-growing microorganisms such as mycobacteria, anaerobic bacteria, viruses from tissue culture assays or animal models. Multiplex PCR (a set of primer that allow amplification of at least two targets (e.g., amplification of at least 2 different genes or sub-regions thereof) provides additional flexibility to detect multiple target pathogenic microorganisms in a single assay or reaction. Other applications of PCR include detection of infectious pathogenic microorganisms and the discrimination of non-pathogenic from pathogenic strains (Salis A., (2009). Applications in Clinical Microbiology. Real-Time PCR: Current Technology and Applications). Amplification products from PCR reactions can be identified via gel electrophoresis although typically most assays utilize real-time PCR, where the amplification product of the PCR reaction is monitored in each cycle of amplification (i.e., in real-time) through the use of a double-stranded fluorescent dye or labeled probe. For example, PCR in veterinary applications can be used to detect bacterial pathogenic microorganisms including, but not limited to, Brachyspiraspp, Chlamydophila abortus, Chlamydophila psittaci, Coxiella burnetii, avian Coxiella-like organism, Lawsonia intracellularis, Mycobacterium avium subsp paratuberculosis, different species of Mycoplasma, and Streptococcus equi subsp equi. Identification of pathogenic microorganisms across mammalian species is useful when addressing zoonotic or potentially zoonotic infections.

[0087] Nucleic acid amplification of the target molecule can be carried out using any suitable amplification method, such as, but not limited to, PCR and related methods. In particular embodiments, amplification of a portion of a gene or genomic region from a pathogen present in a sample can be performed by real-time amplification, such as real-time PCR or reverse transcription PCR (RT-PCR). DNA sequencing can also be carried out using any of the various DNA sequencing methods and sequencing platforms available in the art, such as, but not limited to Illumina Inc., Oxford Nanopore Technologies, Inc., Ion Torrent, Helicos Biosciences Corp., Fluidigm, Nimblegen, Roche Sequencing, and the like. Exemplary DNA sequencing methods are described in the Examples section.

[0088] As used herein, a “sequencing assay” refers to a method for determining the order of nucleotides in at least a part of a nucleic acid molecule. A well-known method of sequencing is the “chain termination” method first described by Sanger et al., PNAS (USA) 74(12): 5463-5467 (1977) and detailed in SEQUENAS™ 2.0 product literature (Amersham Life Sciences, Cleveland) and in European Patent EP-B1-655506. In essence, DNA to be sequenced is obtained (e.g., isolated from a cell or sample), rendered single stranded (denatured), and placed into four vessels. Each vessel contains components to amplify the DNA, which include a template-dependent DNA polymerase, a primer complementary to the initiation site of sequencing of the DNA to be sequenced and deoxyribonucleotide triphosphates for each of the bases A, C, G and T, in a buffer conducive for hybridization between the primer and the DNA to be sequenced and chain extension of the hybridized primer. In addition, each of the vessels contains a small quantity of one type of dideoxynucleotide triphosphate, e.g. dideoxyadenosine triphosphate (“ddA”), dideoxyguanosine triphosphate (“ddG”), dideoxycytosine triphosphate (“ddC”), dideoxythymidine triphosphate (“ddT”). In each vessel, the target DNA is denatured and hybridized with a primer. The primers are extended to form a primer extension product that is complementary to the target DNA (i.e., the template nucleic acid). When a dideoxynucleotide is incorporated into the extending polymer, the polymer is prevented from further extension (blocked). Accordingly, in each vessel, a set of extended polymers of specific lengths are formed which are indicative of the positions of the nucleotide corresponding to the dideoxynucleotide in that vessel. The extended primer products are evaluated, for example using gel electrophoresis, to determine the sequence of the new polymeric strands.

[0089] More recently, the Sanger technique has been surpassed by Next-Generation Sequencing (NGS) platforms. The NGS platforms include automated, massively parallel, high-throughput sequencing methods (see, for example, Illumina iSeq, HiSeq, MiSeq, & NextSeq, Ion Torrent PGM and Proton, Roche 454 Life Sciences, Applied Biosystems SOLiD, Oxford Nanopore Technologies MinION, GridION, and PromethION instruments, and other DNA sequencing platforms). Some of the NGS methods include labels for detection of target molecules (e.g., one, two, three, four, or all nucleotide types corresponding to incorporation of A, G, T, or C, are labeled). In other embodiments, one, two, three, or all nucleotide types are label-free (See, ion semiconductor sequencing, such as the Ion Torrent and DNAe sequencing platforms) such that polymerization or nucleotide incorporation is measured by hydrogen ion release, pyrophosphate release, or a combination thereof. Other examples of NGS techniques contemplated for use with the disclosure include metagenomic NGS, which typically includes “shotgun” based amplification of one or more regions of a target nucleic acid molecule, such as but not limited to bacterial or viral genomes. Typically, metagenomic sequencing involves analysis of genetic information obtained from a sample that contains a plurality of microorganisms, including uncultured organisms. Generally, metagenomic sampling involves sample collection, isolation of nucleic acid molecules of interest, DNA sequencing of the nucleic acid molecules of interest to obtain sequencing reads, alignment of the sequencing reads to a reference genome, and identification of nucleic acid molecules having a sequence similarity above a certain threshold to one or more microorganisms.

[0090] In one embodiment, NGS methods of particular interest include a library preparation and/or a sequencing library. For example, a sample can contain an RNA target of interest (e.g., a viral genome from the Zika virus). The sample may be treated with a DNA destroying reagent (e.g., DNase) to isolate RNA molecules of interest. The RNA molecules can be amplified using primers and any amplification method in the art (e.g., reverse transcriptase) to form cDNA molecules and optionally, first- and second-strand DNA synthesis based on the cDNA molecules to increase the amount of DNA molecules in the reaction, thereby forming a library preparation. In some instances, the library preparation can be further amplified using the same or preferentially, different primers to generate increased amounts of the amplified DNA molecules from the library preparation, thereby forming a sequencing library. The sequencing library (or the library preparation may be used with any appropriate sequencing platform and corresponding sequencing assay (e.g., input DNA applied to the sequencing platform, such as Illumina HiSeq).

[0091] Metagenomic next-generation sequencing (mNGS) is a promising candidate approach for broad-spectrum pathogen identification in clinical samples as nearly all potential pathogenic microorganisms—viruses, bacteria, fungi, and parasites—can be detected on the basis of uniquely identifying DNA and/or RNA shotgun sequences. This method has been successfully applied for clinical diagnosis of infectious diseases, outbreak surveillance by whole-genome viral sequencing, and pathogen discovery. Thus, mNGS can be a particularly useful diagnostic tool for addressing unknown outbreaks, as it does not require a priori targeting of pathogenic microorganisms that may suddenly emerge in a new geographic region, such as EBOV in West Africa. However, current issues related to cost, sequencing depth, and background contamination limit the accuracy of mNGS-based diagnostics relative to specific PCR testing. In particular, the lower throughput and resulting lower sensitivity of portable nanopore sequencers creates a barrier for routine deployment of the platform for diagnostic and surveillance purposes, especially for infections typically present in clinical samples at very low titers, such as ZIKV.

[0092] In a particular embodiment, the disclosure provides for the use of transposome-based sequencing methods to identify a taxon or taxa of pathogenic microorganisms in a sample. Such transposome-based sequencing methods are described in US2014/0162897; US2015/0368638; US2018/0245069; US2018/0023119; WO20122103545; WO20150160895; WO2016130704; WO2019028047; U.S. Pat. No. 9,574,226; EP3161152. The number of steps required to transform a target nucleic acid such as DNA into adaptor-modified templates ready for next generation sequencing can be minimized by the use of transposase-mediated fragmentation and tagging. This process, referred to herein as “tagmentation,” often involves modification of a target nucleic acid by a transposome complex comprising a transposase enzyme complexed with a transposon pair comprising a single-stranded adaptor sequence and a double-stranded transposon end sequence region, along with optional additional sequences designed for a particular purpose. Tagmentation results in the simultaneous fragmentation of the target nucleic acid and ligation of the adaptors to the 5′ ends of both strands of duplex nucleic acid fragments. Where the transposome complexes are support-bound, the resulting fragments are bound to the solid support following the tagmentation reaction (either directly in the case of the 5′ linked transposome complexes, or via hybridization in the case of the 3′ linked transposome complexes). In particular, by using transposase and a transposon end compositions described herein one can generate libraries of di-tagged linear ssDNA fragments or tagged circular ssDNA fragments (and amplification products thereof) from target microbial DNA (including double-stranded cDNA prepared from microbial RNA) for genomic, subgenomic, transcriptomic, or metagenomic analysis or analysis of microbial RNA expression (e.g., for use in making labeled target for microarray analysis; e.g., for analysis of copy number variation, for detection and analysis of single nucleotide polymorphisms, and for finding genes from environmental samples such as soil or water sources).

[0093] Described herein are methods, compositions, and kits for detecting the presence (or absence) of a particular taxon of pathogens, such as but not limited to, a bacterium or virus, in a sample. These methods are useful in the areas of diagnosis of pathogenic infections, epidemiology, and disease surveillance, among others.

[0094] The disclosure generally relates to primers and/or probes for use in a sequencing assay to obtain sequencing reads, alignment of a first portion of the sequencing reads against a first reference genome and alignment of a second portion of the sequencing reads against a second reference genome for a second pathogen, and determining if the first pathogen and/or the second pathogen are present in the sample based on the alignment of the sequencing reads from the sequencing assay. In some embodiments, the disclosure relates to the production of sequencing reads by reverse transcription polymerase chain reaction (RT-PCR) or quantitative reverse transcription polymerase chain reaction (RT-qPCR). In yet another embodiment, the disclosure relates to the detection of a low titer pathogen in the sample amongst an excess of host DNA and/or co-infection by another pathogen. In some instances, the method allows for the detection of a low titer pathogen (e.g., a low titer viral pathogen such as Zika virus) amongst a sample containing another pathogen also present in a low titer.

[0095] The disclosure generally relates to methods for detecting a taxon of pathogenic microorganisms in a sample, wherein the sample may also contain host DNA and/or one or more additional and different taxon of pathogens. In one embodiment, the disclosure generally relates to a method of detecting a particular taxon of pathogenic microorganisms in a sample, comprising, (a) obtaining a sample from (from the environment or a subject) to be screened for a particular taxon of pathogens; (b) applying a sequencing assay to the sample to obtain sequence reads, the sequencing assay including primers having lengths that are within a range of 11 bp to 17 bp, wherein at least a portion of the primers were identified in a species of the particular taxon of pathogens; (c) aligning a first portion of the sequencing reads to a first reference genome for the particular taxon of pathogens; (d) aligning a second portion of the sequencing reads to a second reference genome corresponding to a different taxon of pathogens; and (e) determining whether the particular taxon and/or the different taxon of pathogenic microorganisms is present in the sample based on the alignment of the first and second portion of the sequencing reads.

[0096] The sample analyzed by the methods provided herein can be any sample including, but not limited to, any type of clinical sample or any type of environmental sample. In some embodiments, the sample contains a cell, tissue, or a bodily fluid. In some embodiments, the sample is a liquid or fluid sample. In some embodiments, the sample contains a body fluid such as whole blood, plasma, serum, urine, stool, saliva, lymph, spinal fluid, synovial fluid, nasal swab, respiratory secretions, vaginal fluid, amniotic fluid, or semen. In some embodiments, the sample comprises cells or tissue. In some embodiments, cells, cell fragments, or exosomes are removed from the sample, such as by centrifugation or filtration. In some embodiments, the sample is a biological sample. In some embodiments, the sample may be an unprocessed sample (e.g., whole blood) or a processed sample (e.g., serum, plasma) that contains cell-free or cell-associated nucleic acids. In some embodiments, the sample is enriched for certain types of nucleic acids, e.g., DNA, RNA, cell-free DNA, cell-free RNA, cell-free circulating DNA, cell-free circulating RNA, etc. In one embodiment, the sample is processed to isolate nucleic acids or to separate nucleic acids from other cellular components or nucleic acids within the sample (e.g., DNA or RNA isolation). In some embodiments, the sample is enriched for pathogen-specific nucleic acids. In some embodiments, the sample is enriched for pathogen-specific nucleic acids that are present in retroviruses. In another embodiment, the sample comprises RNA or DNA from a subject infected with, or suspected of harboring an infectious pathogen.

[0097] In a preferred embodiment, the sample comprises target nucleic acids. The target nucleic acids refer to nucleic acids to be analyzed in the sample. In some embodiments, the target nucleic acids are cell-free nucleic acids. For example, the target nucleic acids may be cell-free DNA, cell-free RNA (e.g., cell-free mRNA, cell-free miRNA, cell-free siRNA), or any combination thereof. In certain cases, the cell-free nucleic acids are pathogen nucleic acids, e.g., nucleic acids from pathogenic microorganisms such as viruses, bacteria, fungi, algae, and eukaryotic parasites. In some embodiments, different types of nucleic acids are present in the sample at the same time (e.g., host DNA or RNA and pathogen DNA or RNA).

[0098] In some embodiments, the sample is from a human subject, especially a human patient. In some embodiments, the sample may also be from any other type of subject including any plant, mammal, non-human mammal, non-human primate, domesticated animal (e.g., laboratory animals, household pets, or livestock), or non-domesticated animal (e.g., wildlife). In some embodiments, the subject is a dog, cat, rodent, mouse, hamster, cow, bird, chicken, pig, horse, goat, sheep, rabbit, or monkey. In some embodiments, the sample is from an environment (e.g., a water source, soil, food source, household or office or hospital items) and the like.

[0099] In one embodiment, the sample contains a certain amount, titer or concentration of target nucleic acids. Target nucleic acids within a sample may include double-stranded (ds) nucleic acids, single stranded (ss) nucleic acids, DNA, RNA, cDNA, dsDNA, ssDNA, circulating nucleic acids, circulating cell-free nucleic acids, circulating DNA, circulating RNA, genomic DNA, exosomes, cell-free pathogen nucleic acids, circulating pathogen nucleic acids, or any combination thereof. As used herein, the term “cell-free” refers to the condition of the nucleic acids as they appeared in the subject before the sample was obtained from the subject. For example, circulating cell-free nucleic acids includes cell-free nucleic acids circulating in the bloodstream of the subject. In contrast, nucleic acids that are extracted from a solid tissue, such as a biopsy, are generally not considered to be “cell-free”.

[0100] The sample may be obtained by any means known in the art. For example, the sample may be obtained by syringe (such as a FNA), blood draw, or direct placement into a vessel (such as urine, semen, feces, sputum, etc.), by swab, aspiration and the like. In some embodiments, obtaining the sample can include one or more processes that refine, purify and/or isolate the sample from its original composition, such as, but not limited to, nucleic acid extraction kits (e.g., PureLink Viral RNA/DNA purification kit, ThermoFisher Scientific, Catalog No.: 12280050).

[0101] In one embodiment, the subject is a host organism (e.g., a human) infected with a pathogen, at risk of infection by a pathogen, or suspected of having a pathogenic infection. In some embodiments, the subject is suspected of having a particular infection, e.g., suspected of exposure to the Zika virus, bacterial pathogen etc. In other embodiments, the subject is suspected of having an infection of unknown origin. In some embodiments, a host is infected with more than one pathogen (e.g., a bacterial infection and co-infection with a virus, fungi or parasite). In some embodiments, a subject has been diagnosed with, or is at risk for developing symptoms associated with viral, bacterial or fungal infection. In some embodiments, the subject is healthy and the methods disclosed herein are used to confirm the absence of a pathogen in the subject. In some embodiments, the subject is susceptible or is at risk of a pathogenic infection (e.g., an immunocompromised patient, elderly patient, newborn infant, is situated or has recently visited a locale known to possess infected subjects). In one example, the subject from whom the sample is obtained includes a mammalian host. In a specific embodiment, the subject includes a human host.

[0102] In some embodiments, the methods (and associated compositions and kits) disclosed herein are useful for detecting the presence of a first taxon of pathogenic microorganisms present in a sample. In another embodiment, the methods (and associated compositions and kits) disclosed herein are useful for detecting the absence of a particular taxon of pathogenic microorganisms present in a sample. The methods allow for the detection of one or more pathogenic microorganisms in a sample. In one embodiment, the method includes detection of 2, 3, 4, 5, 6, 7, 8, 9, 10 or more, pathogenic microorganisms from a single sample. In another embodiment, the method includes detection of at least two different taxa of pathogenic microorganisms from a single sample, e.g., a sample from a human subject. In some embodiments, the method includes determining whether a first taxon of pathogenic microorganisms is present in the sample (for example, based on alignment of one or more amplified nucleic acids obtained during the sequencing assay against a reference genome of the first taxon of pathogens). In another embodiment, the method includes determining whether a first taxon of pathogen is absent from the sample (for example, based on alignment of one or more amplified nucleic acids obtained during the sequencing assay against a reference genome of the first taxon of pathogens).

[0103] The methods provided herein (and associated kits and compositions) can be used to detect a plurality of pathogenic microorganisms present in a single sample. In one embodiment, the method includes detecting at least one viral taxon in the sample. In another embodiment, the method includes detecting at least one viral taxon and one bacterial or fungal taxon in the sample (i.e., a co-infection). In yet another embodiment, the method includes detecting at least one viral taxon and one algae, prion, or parasitic infection in the sample (i.e., a co-infection). In one embodiment, the method includes detecting at least one bacterial pathogen in a sample. In any of the embodiments, the method can detect pathogenic microorganisms that are resistant to a particular therapy (e.g., an antibiotic treatment, antiviral treatment, antifungal treatment, algicide, etc.).

[0104] In one embodiment, the method also provides for the detection of one of more viral genera. An exemplary list of viral genera is provided in List 1. It will be apparent to one of ordinary skill in the art that the viral genera provided in List 1 should not be construed as exhaustive. In another embodiment, the method provides for the detection of one of more fungal genera. An exemplary list of fungal genera is provided in List 2. It will be apparent to one of ordinary skill in the art that the fungal genera provided in List 2 is not to be construed as exhaustive. In yet another embodiment, the method provides for the detection of one of more bacterial genera. An exemplary list of bacterial genera is provided in List 3. It will be apparent to one of ordinary skill in the art, that the bacterial genera provided in List 3 is not to be construed as exhaustive. It will be readily apparent that new bacterial, fungal and viral genera can be identified, e.g., based on sequence alignment of the new pathogen as compared against one or more known/existing pathogen taxa.

[0105] In one embodiment, the particular taxon of pathogenic microorganisms in a sample from a subject is a viral taxon. In some embodiments, the viral taxon includes viral genera and can include but is not limited to any one of the genera provided in List 1. In one embodiment, the viral genus is Flavivirus. Flavivirus is a genus of the family Flaviviridae which includes West Nile Virus (WNV), dengue virus, tick-borne encephalitis virus, Japanese encephalitis virus, yellow fever virus, Zika virus, insect-specific flaviviruses (ISFs) such as cell fusing agent virus (CFAV) Palm Creek virus (PCV) and Parramatta River virus (PaRV). Flaviviruses share significant common features such as size (40-65 nm), symmetry (enveloped, icosahedral nucleocapsid), and nucleic acids (positive sense single strand RNA of about 10,000 bases). Most Flaviviruses are transmitted by vectors such as a mosquitoes or ticks. Zika virus, yellow fever and dengue virus are frequently transmitted via mosquitoes and are capable of replicating in a host and transmitting viral material to other subjects even if the viral titer in the host is low. Other transmission routes for Flavivirus infection include blood transfusion, child birth, pregnancy, sexual contact, handling of infected animal carcasses or byproducts.

[0106] In another embodiment, the particular taxon of pathogenic microorganisms in a sample from a subject is the viral taxon. In some embodiments, the viral taxon includes the viral genera Alphavirus. Alphavirus is a genus of the family Togaviridae which includes Chikungunya virus (CHIKV), Barmah Forest virus, Mayaro virus, Ross River virus, Semliki Forest virus, Sindbis virus, Una virus, Eastern Equine encephalitis virus, Tonate virus, Western Equine encephalitis virus, O'nyong'nyong virus and Venezuelan equine encephalitis virus. Alphaviruses share significant common features such as size (˜40 nm diameter nucleocapsid), symmetry (enveloped, isometric nucleocapsid), and nucleic acids (positive sense, single strand RNA genome of about 11,000 bases). Alphaviruses are mainly transmitted by mosquitoes.

[0107] Viral titer, viral load or viral burden are used herein interchangeably and refer to a numerical expression of the quantity of a virus in a given volume. Viral titer frequently refers to the measurement of the lowest concentration of a virus that can successfully infect cells. To determine viral titer, typically, serial dilutions of a viral sample (containing a known amount of the virus) are prepared. For example, Zika virus can be prepared using petri dishes containing Vero cells (immortal cell line from kidneys of African Green monkeys) and a small amount of Zika virus added to the Vero cells (Contreras and Arumugaswami, (2016), J. Vis. Exp., (114), e54767). After several days, the Vero cells are evaluated to determine which, if any, of the serial dilutions experienced cell death and which, if any, of the serial dilutions continued to undergo cell replication. An exemplary technique for determining viral titer is the plaque assay (Dulbecco and Vogt, (1953) Cold Spring Harbor Symp. Quant. Biol., 18:273-79). Generally, the plaque assay includes preparing monolayers of cells incubated with a preparation of virus to allow adsorption of the virus into the cells. The cells are a covered with a nutrient layer such as agar to form a gel. When the infected cells release new progeny viral particles, the gel restricts the spread of viral particles to neighboring uninfected cells, which is visible as a circle or plaque in the petri dish. The viral titer from plaque assays is expressed as plaque forming units per ml (PFU/ml). Viral load, viral titer, etc., can be expressed as the number of viral particles or infectious particles per ml (e.g., viral genome copies per ml). For example, the quantity of virus per ml can be calculated by estimating the live amount of virus in a body fluid (e.g., RNA copies per ml of blood plasma). Tracking viral load is useful to monitor therapy e.g., treatment of chronic viral infections, patients who are immunocompromised or are recovering from organ/bone marrow transplantation.

[0108] In some embodiments, one or more other taxa of pathogen are identified that are distinct from the first taxon of pathogenic microorganisms against which the sample is screened. The sample can be screened for both pathogen taxa, although the first taxon of pathogenic microorganisms is typically present in the sample at a lower titer than the one or more other taxa of pathogens. In one embodiment, the one or more other taxa of pathogenic microorganisms includes a bacterial, fungal, algal, protozoan, and/or microscopic parasite. In one example, the one or more other taxa of pathogenic microorganisms is selected from any of the genera provided in List 2 and List 3.

[0109] The genome of an RNA virus, such as the Zika virus as well as other Flaviruses and retroviruses are comprised of ribonucleic acids (RNA). Accordingly, in order to perform PCR on the template nucleic acid, the RNA must first be transcribed into complementary DNA (cDNA) via the action of an RNA specific enzyme, reverse transcriptase prior to the sequencing assay. Reverse transcriptase uses the RNA template nucleic acid and a primer complementary to the 3′ end of the viral RNA to initiate synthesis of the first strand of complementary DNA (cDNA). This process is known as reverse transcription. The resulting synthesized nucleic acid molecule is cDNA, which by itself can be used directly as a template nucleic acid for amplification, such as PCR, for example using probes that are specific for at least a portion (e.g., between 10-50 nucleotides) of the cDNA sequence.

[0110] As disclosed herein, viral RNA obtained from a sample from a subject can be used in PCR assays to detect viral infection, among other pathogenic microorganisms or host DNA. The template nucleic acid (e.g., RNA or cDNA) need not be purified; it may be a minor fraction of a complex mixture (e.g., a clinical sample such as whole blood, biopsy, tissue sample or plasma). In some instances, the viral template nucleic acid can be present in low titer amounts, such as less than 100 infectious viral particles per mL. If needed or preferred, viral nucleic acid molecules may be extracted from a biological sample by routine techniques such as those described in Diagnostic Molecular Microbiology: Principles and Applications (Persing et al. (eds), 1993, American Society for Microbiology, Washington D.C.).

[0111] The methods (and associated kits and compositions) provided herein can be used to detect a taxon of pathogenic microorganisms in a sample from a subject (e.g., target nucleic acids) via a sequencing assay such as, multiplex RT-qPCR. The target nucleic acids can include, but are not limited to, whole or partial genomes, genetic loci, genes, exons, or introns. In one embodiment, the methods provided herein detect pathogenic target nucleic acids from a biological sample obtained from a subject. In some cases, the pathogenic target nucleic acids are present in complex clinical sample (e.g., an unprocessed sample such as whole blood or processed sample such as serum) containing nucleic acids from the subject (i.e., the host) and the pathogen. In some embodiments, the pathogenic target nucleic acids are associated with an infectious disease, such as Human Immunodeficiency Virus (HIV), Zika Virus, Hepatitis B, or Hepatitis C. In some embodiments the methods (and associated kits and compositions) are useful for the detection of pathogen nucleic acids transmitted via mosquitoes, such as Aedes aegypti and Aedes albopictus. In some embodiments, the pathogen target nucleic acids are viral nucleic acids. In another embodiment, the pathogen target nucleic acids are bacterial nucleic acids. In yet another embodiment, the target nucleic acids are viral nucleic acids present in a human sample. In a further embodiment, the target nucleic acids are Flavivirus nucleic acids present in a human sample such as urine or serum.

[0112] In some embodiments, the pathogen nucleic acids are present in a tissue sample, such as a tissue sample from a site of infection. In other embodiments, the pathogen nucleic acids have migrated from the site of infection; for example, it may be obtained from a sample containing circulating cell-free nucleic acids (e.g., circulating cf-DNA or cf-RNA).

[0113] In some embodiments, the target nucleic acids may make up a very small portion of the entire sample under evaluation, e.g., less than 1%, less than 0.5%, less than 0.1%, less than 0.01%, less than 0.001%, less than 0.0001%, less than 0.00001%, less than 0.000001%, or less than 0.0000001% of the total nucleic acids in the sample. In another embodiment, the target nucleic acids may make up from about 0.00001% to about 0.5% of the total nucleic acids in a sample. Often, the total nucleic acids in a sample may vary. For example, total cell-free nucleic acids (e.g., DNA or RNA) may be in a range of 1-100 ng/ml, e.g., (about 1, 5, 10, 20, 30, 40, 50, 80, 100 ng/ml). In some cases, the total concentration of cell-free nucleic acids in a sample is outside of this range (e.g., less than 1 ng/ml; in other cases, the total concentration is greater than 100 ng/ml). In another embodiment, total DNA in a sample (e.g., genomic, mitochondrial and pathogenic DNA extracted and purified from 100 μl of whole blood) may be in excess of 3 μg (see, Qiagen Dneasy Blood and Tissue purification kit, Catalog No. 69504). In some embodiments, the sample may contain a low viral titer of pathogen target nucleic acids which would still be elevated as compared to a non-infected, healthy sample. For example, pathogen target nucleic acids may make up less than 0.001% of total nucleic acids in an infected sample.

[0114] The length of target nucleic acids can vary. In some cases, target nucleic acids may be about or at least about 20, 30, 40, 50, 60, 70, 80, 90, 100, 110, 120, 130, 140, 150, 160, 170, 180, 190, 200, 250, 300, 350, 400, 450, 500, 550, 600, 650, 700, 750, 800, 850, 900, 950, 1000 or more nucleotides (or base pairs) in length, or a range of lengths between or including any two of the forgoing values (e.g., from about 30 to about 600 base pairs or nucleotides in length, from about 30 to about 250 base pairs or nucleotides in length, etc.). In some embodiments, the target nucleic acids are relatively short, e.g., less than 600 base pairs (or nucleotides) in length. In yet another embodiment, the target nucleic acids may be between 30 and 150 base pairs or nucleotides in length.

[0115] In some embodiments, the target nucleic acids include but are not limited to double-stranded (ds) nucleic acids, single stranded (ss) nucleic acids, DNA, RNA, cDNA, dsDNA, ssDNA, circulating nucleic acids, circulating cell-free nucleic acids, circulating DNA, circulating RNA, cell-free nucleic acids, cell-free DNA, cell-free RNA, circulating cell-free DNA, cell-free dsDNA, cell-free ssDNA, circulating cell-free RNA, genomic DNA, cell-free pathogen nucleic acids, circulating pathogen nucleic acids, circular DNA, circular RNA, circular single-stranded DNA, circular double-stranded DNA, or any combination thereof. The target nucleic acids are preferably nucleic acids derived from pathogenic microorganisms including but not limited to viruses, bacteria, fungi, parasites and other infectious microbes, including eukaryotic parasites. In some embodiments, target nucleic acids may be from the subject (e.g., host) as opposed to, or in addition to, target nucleic acids from a taxon of pathogens.

[0116] A sequencing library can be generated from a sample using the methods, compositions and kits provided herein or any suitable methods known in the art. Various commercial kits exist for the preparation of samples for NGS (e.g., Ion Ampliseq Library Kit 2.0, ThermoFisher Scientific, Catalog No.: 4475345). A sequencing library preferably comprises a plurality of target nucleic acids (e.g., a multiplex) that is compatible with any of the sequencing systems disclosed herein or known in the art. In some embodiments, a sequencing library generated from a sample from a subject is prepared for use on an Illumina sequencing platform (e.g., HiSeq or MiSeq). Optionally, target nucleic acids prepared for use in the sequencing library may comprise one or more adapters appended to one, or both, ends of the target nucleic acid molecules to aid in downstream analysis or classification. Optionally, the target nucleic acid molecules of the sequencing library may contain a barcode to distinguish one set of target nucleic acid molecules from a first sample from target nucleic acid molecules prepared from a second (e.g., a different sample from a different source or a sample collected at a different time from the same source (e.g., before and after infection) sample.

[0117] Steps for preparing a library preparation may include one or more of: obtaining (e.g., isolating or extracting) target nucleic acids from a sample, fragmenting the target nucleic acids, amplify the target nucleic acid using one or more primers thereby forming a library preparation, and storing the library preparation for later use. The library preparation steps outlined above are applicable to both DNA and RNA based libraries. Typically to amplify RNA, the target RNA is incubated with a DNA destroying reagent (e.g., DNase) to obtain an RNA sample. Steps for preparing a sequencing preparation may include one or more of: amplify the target nucleic acid molecules of the library preparation, attaching adapters to the amplified library preparation, and sequencing the amplified library preparation on a sequencing platform.

[0118] The methods (and associated compositions and kits) disclosed herein provide improved identification and/or quantification of target nucleic acid molecules in a sample from a subject, e.g., by RT-qPCR and/or NGS, particularly when the target nucleic acid molecules are present in low abundance in the sample (e.g., low viral titer) or when multiple pathogenic microorganisms are present. Additionally, the methods provided herein can be used to increase the yield of the target, particularly when the starting sample has relatively low amounts of the target.

[0119] Any detection method may be used which is suitable for the sequencing assay employed. In some embodiments, the sequencing assay can employ a label in the detection method. The term “label” as used herein refers to a composition detectable by spectroscopic, photochemical, biochemical, immunochemical, chemical, or other physical means. For example, useful labels include fluorescent dyes, luminescent agents, radioisotopes (e.g., ³²P, ³H), electron-dense reagents, enzymes, biotin, digoxigenin, or haptens and proteins, or other entities which can be made detectable, e.g., by incorporating a radiolabel into an oligonucleotide, peptide, or antibody specifically reactive with a target molecule. Exemplary detection methods include radioactive detection (e.g., ³²P), optical absorbance detection, e.g., UV-visible absorbance detection, optical emission detection, e.g., fluorescence or chemiluminescence. For example, labeled amplification products from a PCR, such as cDNA or DNA, can be detected using a sequencing platform by scanning all or portions of each labeled amplification product simultaneously or serially, depending on the sequencing platform and method used. For radioactive signals (e.g., ³²P), a phosphorimager device can be used (Johnston et al., 1990; Drmanac et al., 1992; 1993). In another embodiment, target molecules (e.g., cDNA molecules) can be label-free and their production detected by release of hydrogen ions during incorporation of each nucleotide during DNA synthesis (i.e., polymerization of DNA) (See, Ion Torrent sequencing platforms such as Personal Genome Machine and Proton sequencers, Life Technologies Corp., Carlsbad, Calif. and e.g., U.S. Pat. Nos. 9,139,874; 9,309,557 and 9,657,281). In another embodiment, the sequencing assay can include nanopore sequencing such as, but not limited to, sequencing methods disclosed in U.S. Pat. Nos. 8,852,864; 8,968,540; 9,121,059; 9,279,153; and 9,542,527.

[0120] In some embodiments, a signal from any of the detection methods utilized can be measured and/or analyzed manually or by appropriate computational methods to formulate results. The results can be measured to provide qualitative or quantitative results, depending on the needs of the user. Reaction conditions can include appropriate controls for verifying the integrity of amplification and/or sequencing assay, and for providing standard curves for quantitation, if desired (e.g., RT-qPCR). In some embodiments, a computational method comprises a computer system.

[0121] In some embodiments, the sequencing assay comprises a polymerase chain reaction (PCR). In one embodiment the sequencing assay comprises quantitative PCR (qPCR), reverse-transcription polymerase chain reaction (RT-PCR), or reverse transcription quantitative polymerase chain reaction (RT-qPCR).

[0122] In some embodiments, data obtained from the sequencing assay is in form of nucleotide sequences representing sequence reads obtained from the sample. In one embodiment, the sequencing assay comprises at least one reverse primer selected from any of the reverse primers in SEQ ID NOs: 1-96, 399-1562, 1563-3553, and 3554-7324. In another embodiment, the sequencing assay comprises at least one forward primer selected from any of the forward primers in SEQ ID NOs: 1-96, 399-1562, 1563-3553, and 3554-7324. In some embodiments, where the sample is suspected of containing an RNA virus, at least one of the primers in the sequencing assay comprises a primer that is complementary to either (i) the suspected RNA virus or (ii) another RNA virus. In another embodiment, where the sample is suspected of containing a bacterium, at least one of the primers in the sequencing assay comprises a primer that is complementary to the suspected bacterium or another bacterial genus. In some embodiments, the sequencing assay comprises reverse transcription of one or more target RNA molecules present in the sample using any of the primers set forth in SEQ ID NOs: 1-96, 399-1562, 1563-3553, and 3554-7324. In one embodiment, the sequencing assay further comprises a probe to determine the amount of amplified product produced in the sequencing assay by the primers. In one embodiment, the probe can include any one or more of the probes sequences provided herein as SEQ ID NO: 98-398. In one embodiment the amount of amplified product produced in the sequencing assay can be measured, determined or quantified by qPCR.

[0123] In some embodiments, the sequencing assay produces between 10,000 and 100 million raw sequencing reads. In some embodiments, the sequencing reads can be refined to remove bad quality or low-quality sequencing reads. In some embodiments, the sequencing assay provides greater than 10 sequencing reads and fewer than 100,000 sequencing reads per amplified target nucleic acid. In another embodiment, the sequencing reads can be deduplicated to remove duplicate reads from the raw sequencing assay data.

[0124] In some embodiments, a first portion of the sequencing reads are aligned against a first reference genome (e.g., for a particular taxon of pathogens). In another embodiment, a second portion of the sequencing reads are aligned against a second reference genome (i.e., a different taxon of pathogens). As used herein, “a first portion of the sequencing reads” generally refers to (i) a numerical value (e.g., at least 10 sequencing reads) or a percentage (e.g., at least 1%) of the total sequencing reads, or (ii) a nucleotide length within one or more of the sequencing reads that aligns with the first reference genome. In one embodiment, a first portion of the sequencing reads refers to at least 1%, 3%, 5%, 10%, 20%, 25%, or more, of the sequencing reads from the sequencing assay aligning against the first reference genome. In another embodiment, a first portion of the sequencing reads refers to an alignment of 10 nt, 15 nt, 20 nt, 25 nt, 30 nt, 35 nt, 40 nt, 45 nt, 50 nt, 55 nt, 60 nt, 65 nt, 70 nt, 75 nt, 80 nt, 85 nt, 90 nt, 95 nt, or 100 nt, or a range that includes or is between any two of the foregoing nt values, within one or more of the sequencing reads aligned with the first reference genome. In another embodiment, aligning the first portion of sequencing reads comprises aligning between 10 and 50 contiguous nucleotides from one or more of the sequencing reads with the first reference genome. The first reference genome can comprise one or more viral, bacterial, fungal, algal, protozoan or parasitic genomes (or partial genomes thereof). In a preferred embodiment, the first reference genome is a viral genome. In one embodiment, the first reference genome comprises a consensus sequence for the taxon of pathogenic microorganisms (e.g., Flavivirus or Alphavirus). In some embodiments, the first reference genome comprises an arbitrary set of genomes for a single pathogen taxon (e.g., genomes from different species and/or individual strains within a particular taxon of pathogens) selected from one or more complete or partial genomes available in the art (e.g., GenBank Accession Numbers).

[0125] In some embodiments, a second portion of the sequencing reads are aligned against a second reference genome (e.g., for a different taxon of pathogens). As used herein, “a second portion of the sequencing reads” generally refers to (i) a numerical value (e.g., at least 10 sequencing reads) or a percentage (e.g., at least 1%) of the total sequencing reads, or (ii) a nucleotide length within one or more of the sequencing reads that aligns with the second reference genome. In one embodiment, a second portion of the sequencing reads refers to at least 1%, 3%, 5%, 10%, 20%, 25%, or more, of the sequencing reads from the sequencing assay aligning against the second reference genome. In another embodiment, a second portion of the sequencing reads refer to an alignment of 10 nt, 15 nt, 20 nt, 25 nt, 30 nt, 35 nt, 40 nt, 45 nt, 50 nt, 55 nt, 60 nt, 65 nt, 70 nt, 75 nt, 80 nt, 85 nt, 90 nt, 95 nt, or 100 nt, or a range that includes or is between any two of the foregoing nt values, within one or more of the sequencing reads against the second reference genome. In another embodiment, aligning the second portion of sequencing reads comprises aligning between 10 and 50 contiguous nucleotides from one or more of the sequencing reads with the second reference genome. The second reference genome can comprise one or more known viral, bacterial, fungal, algal, protozoan or parasitic genomes (or partial genomes thereof). In a preferred embodiment, the second reference genome is a bacterial or fungal genome. In one embodiment, the second reference genome comprises a consensus sequence for the different taxon of pathogenic microorganisms (e.g., T2 bacteriophage). In another embodiment, the second reference genome comprises a consensus sequence obtained from between 10 and 200 genes present in the genome of the different taxon of pathogens. In some embodiments, the second reference genome comprises an arbitrary set of genomes (e.g., genomes from different species and/or individual strains within the different taxon of pathogens) for the different taxon of pathogenic microorganisms selected from one or more complete or partial genomes available in the art (e.g., GenBank Accession Numbers).

[0126] In one embodiment, the first reference genome is a complete or partial viral genome and the second reference genome is a complete or partial bacterial genome. In a preferred embodiment, a first portion of the sequencing reads are aligned against a first reference genome for a particular taxon of pathogenic microorganisms and a second portion of the sequencing reads are aligned against a second reference genome for a different taxon of pathogens, and based on the alignment of the first and second portion of the sequencing reads it is determined whether the particular taxon of pathogenic microorganisms is present or absent in the sample.

[0127] Any suitable method, calculation, or threshold may be used to determine whether the alignment of the first portion of the sequencing reads corresponds to the first reference genome. In one embodiment, the particular taxon of pathogenic microorganisms may be determined as present in the sample if at least 1%, 2%, 5%, 10% or more, of a first portion of the sequencing reads aligns with the first reference genome. Conversely, any suitable method, calculation or threshold may be used to determine whether a lack of alignment between the first portion of the sequencing reads and the first reference genome corresponds to a lack of the taxon of pathogenic microorganisms in the sample. For example, it may be determined that the target is absent from the sample, where greater than 95%, 96%, 97%, 98%, 99% or more of the sequencing reads do not align with the first reference genome.

[0128] Any suitable method, calculation or threshold may be used to determine whether the alignment of the second portion of the sequencing reads corresponds to the second reference genome. In one embodiment, the different taxon of pathogenic microorganisms may be determined as present in the sample if at least 1%, 2%, 5%, 10% or more, of a second portion of the sequencing reads align with the second reference genome. Conversely, any suitable method, calculation or threshold may be used to determine whether a lack of alignment between the second portion of the sequencing reads and the second reference genome corresponds to the different taxon of pathogenic microorganisms in the sample. For example, it may be determined that the different taxon of pathogenic microorganisms is absent from the sample, where greater than 95%, 96%, 97%, 98%, 99% or more of the sequencing reads do not align with the second reference genome.

[0129] The methods, compositions and kits disclosed herein contain primers that are useful for detection of pathogenic microorganisms in a sample. In some embodiments, the primers are suitable for the detection of a plurality of pathogenic microorganisms in a single sample. For example, two, three, four, five, or more primers or primer pairs, may be used in a single sequencing assay to determine whether a taxon of pathogenic microorganisms is present in the sample. In another embodiment, the primers or primer pairs may be used in a single sequencing assay to determine whether a plurality of pathogen taxa are present in a single sample. In some instances, each primer (or primer pair) is specific for an individual pathogen (e.g., species-specific or taxon-specific). In another embodiment, each primer (or primer pair) can be quasi-random sharing partial complementarity along the primer length to one or more species and/or individual strains from the particular taxon of pathogenic microorganisms or different taxon of pathogens. In another embodiment, the primers (or primer pairs) may be used to distinguish between different pathogenic microorganisms (e.g., distinguish bacterial pathogenic microorganisms from viral, fungal, algae or parasitic pathogens; or distinguish between taxa within a single taxonomic classification (e.g., bacterial domain or viral domain)). In one embodiment, at least one, two, three, four, or more of the primers in the sequencing assay are identified in a species of the particular taxon of pathogens. In another embodiment, at least one of the primers in the sequencing assay is identified in a species of the different taxon of pathogens. In some embodiments at least a portion of the primers in the sequencing assay are identified in a species of the particular taxon of pathogenic microorganisms (e.g., at least one of the primers or at least 5% of the primers) and is therefore indicative of that species (and the larger taxon) being present in the sample.

[0130] In contrast to traditional PCR methods, the primers disclosed herein are shorter in nucleotide length, in a range of between 11 to 17 nucleotides in length. Traditional PCR includes primers that are longer, for example between 18 and 30 nucleotides in length, and preferably between 20 and 24 nucleotides in length. Additionally, traditional PCR primers require that the primers are target-specific for the target(s) of interest to prevent random or mis-priming amplification products. Random primers have been used for amplification of nucleic acids molecules in general within a reaction mixture. The rationale for random primer use is that with enough random primers in the PCR method (e.g., hexamers or nonamers) all of the nucleic acid molecules in the reaction mixture have an equal likelihood of being amplified during the PCR process. Targeted primers (e.g., target specific primers) introduce bias in the PCR method because the targeted primers are selective for particular nucleic acid sequences within the sample and preferentially amplify the target nucleic acid sequences over a background of other nucleic acid molecules in the sample. In one aspect, the methods, compositions and kits disclosed herein comprise primers having a length of between 11 and 17 nucleotides. In some embodiments, a set (or panel) of primers or primer pairs for use with the disclosed methods, kits and compositions comprises at least two primers (one primer pair) and is preferably comprises more than 50, 100, 150, 200, 250, 300, 350, 400, 450, 500, 550, 600, 650, 700, 750, 800, 850, 900, 950, 1,000, 2,000, 3,000, 4,000, 5,000 primer pairs, or a range of primer pairs that includes or is between any two of the foregoing values.

[0131] In one aspect, primers for use in the methods, compositions and kits are prepared according to the workflow provided in FIGS. 2A and 11A. In one embodiment, primers having a length of between 11 and 17 nucleotides are designed from a set of reference genomes (e.g., Zika virus genomes) by consecutive steps of multiple sequence alignment to form a consensus sequence, partitioning of the consensus sequence to form nucleotide segments, and selection of a forward and reverse primer (e.g., a primer pair) within a nucleotide window of a specified length present in the 5′ and 3′ terminal ends of the nucleotide segments. It will be apparent that the primers may be prepared by manual alignment, computational alignment, or any combination thereof.

[0132] In some embodiments, a computational algorithm can be used to design a set of primers from a set of reference genomes. In one embodiment, the algorithm can perform consecutive steps of multiple sequence alignment of the reference genomes to form a consensus sequence, partitioning of the consensus sequence into nucleotide segments of between 200 and 300 nucleotides, and selection of forward and reverse primers within the terminal ends of the nucleotide segment (e.g., select forward and reverse primers from within a 50 nucleotide window at each end of the nucleotide segment, see. FIGS. 2A and 11A). In another embodiment, the algorithm can perform consecutive steps of multiple sequence alignment of a set of reference genomes to generate a consensus sequence between the set of reference genomes, partitioning the consensus sequence into nucleotide segments of 100 bp, 200 bp, 300 bp, 400 bp, 500 bp, 600 bp, 700 bp, 800 bp, 900 bp, 1000 bp, 1200 bp, 1400 bp, 1500 bp, 2000 bp, or a range of base pairs that includes or is between any two of the foregoing values (e.g., 200-900, 300-800, 400-700, or 500-600 bp), and selection of forward and reverse primers within the terminal ends of each of the nucleotide segments (e.g., select one or more forward and reverse primers from within a 100 nucleotide window at each terminus of the nucleotide segment). In some embodiments, the algorithm can identify a single primer capable of amplifying at least one nucleotide segment across the reference genome. In one embodiment, the algorithm can identify a single primer capable of amplifying every nucleotide segment across the reference genome. In some embodiments, the algorithm can identify a single primer capable of amplifying each of the nucleotide segments across the reference genome, if present in the sample. In another example, the algorithm can design a primer capable of amplifying each species or individual strain of pathogen (e.g., Zika virus) presently known in the art based on alignment of the primer against the nucleotide segments (e.g., 600 base pair nucleotide segments) present in each of the species or individual strains of the pathogen (e.g., based on review of GenBank viral genome data). In another embodiment, the algorithm can design a primer such that it amplifies each species or individual strain of the Zika virus presently known, using a single nucleotide segment present in each of the species or individual strains of Zika virus. In another embodiment, a primer (e.g., primer 1) can be designed to amplify each species or individual strain of Zika virus presently known (e.g., based on review of GenBank genome data) based on predicted amplification of individual nucleotide segments across the Zika virus genome. In one embodiment, a primer panel of two or more primers can be designed, wherein Primer 1 does not amplify the same nucleotide segment as any other primer in the primer pool (e.g., Primer 2). In yet another embodiment, one or more primers within a primer panel can be designed in a redundant fashion, such that the genome of a pathogen of interest (e.g., Zika virus) is divided into nucleotide segments (e.g., between 200-300 bp or 600 bp) as disclosed above; designing a first primer based on the greatest (highest) number of nucleotide segments the primer can amplify across the pathogen's genome (preferably, across all species and individual strains) as compared to any other primer in the primer panel; and combining the first primer with a second primer, wherein the second primer is designed based on the next greatest (highest) number of nucleotide segments that primer 2 can amplify across the pathogen's genome, and so on. In this example, a plurality of primers can be identified that each amplify tens, or hundreds, of nucleotide segments across the pathogen's genome, preferably across all strains and individual species of the pathogen. In one embodiment, the primers are selected such that once a primer is predicted to amplify between 50 and 100 nucleotide segments across the pathogen's genome, those nucleotide segments are removed from the algorithm such that remaining primer designs do not amplify the removed nucleotide segments.

[0133] In one embodiment, the reference genomes are a set of arbitrary viral genomes from the same or different genera. In another embodiment, the reference genomes are a set of arbitrary bacterial genomes from the same or different genera. In yet another embodiment, the reference genomes are a set of arbitrary fungal, archaea or parasitic genomes from the same or different genera. It is contemplated that the reference genomes are selected in view of the type of pathogen to be detected. In one embodiment, the reference genomes are selected from genomes readily available in the art (e.g., GenBank), associated with a pathogen of interest (e.g., Zika virus), and optionally, associated with samples obtained from the same or adjacent geographic region (e.g., Central America, South America, North America, Mexico). The reference genomes do not require complete or full genomic coverage. As is evident from FIG. 1C, a consensus sequence for the Zika virus was prepared as outlined above from reference genomes that were incomplete. In some embodiments, it is preferred that greater than 25%, 50%, 75%, or more, of the reference genomes to utilize to generate a consensus sequence, which is partitioned into nucleotide segments, (e.g., of between 200 and 300 nucleotides or about 600 bp in length). In one embodiment, the nucleotide segments are approximately 250 nucleotides in length.

[0134] In some embodiments, primers are designed by partitioning the consensus sequence of the pathogen across a specific set of genes found in the genome of the pathogen. The consensus sequence for a particular taxon of pathogenic microorganisms (or different taxon of pathogens) represents highly conserved regions of the pathogen's genome found amongst different species or individual strains of a taxon of pathogens. Accordingly, by selecting highly conserved regions of the pathogen genome as the basis for developing primers, the resulting primers can be targeted to the highly conserved regions of the genome of the pathogen of interest. In one embodiment, when assessing fungi and bacterial pathogens, the primers can be designed based on specific genes, such as between 5 and 500 genes found in the genome of the fungi or bacteria of interest, preferably between 10 and 200 genes, and most preferably between 10 and 50 genes. In another embodiment, partitioning of the consensus sequence of the taxon of pathogenic microorganisms can include generation of nucleotide segments based on gene type or function. For example, genes associated with DNA or RNA polymerase may be located across the genome of the pathogen of interest and the consensus sequence is prepared from these regions of the genome into nucleotide segments; followed by selection of forward and reverse primers from the terminal ends of the nucleotide segments. In another embodiment, the genome of the pathogen of interest is partitioned into nucleotide segments, and the nucleotide segments falling within the specific set of genes of interest (e.g., antibiotic resistance genes) are retained and the remainder of the partitioned consensus sequence is not used to design the forward and reverse primers.

[0135] The primers can be designed to be of any length between 10-50 nucleotides, but are typically between 1017 nucleotides in length (e.g., about 13 nt in length). In some embodiments, the primers (e.g., the 11-17 nucleotide length primers) are optionally tagged or ligated to a nucleic acid adapter (See, FIG. 2B). The nucleic acid adapter can comprise between 10 and 50 nucleotides, in some instances between 15 and 30 nucleotides, and typically between 15 and 20 nucleotides. In one embodiment the adapter is an 18-mer. In a specific embodiment, the adapter comprises or consists of SEQ ID NO:97. The adapter can optionally include one or more modified nucleotides/nucleosides or nucleotide analogs. However, the adapter typically retains conventional hydrogen base-pair bonding capabilities. In one embodiment, the nucleic acid adapter ligated or tagged to the primers, as outlined above, is itself used as a primer in a subsequent or downstream amplification process. Optionally, the adapter contains a unique barcode sequence that allows for differentiation of samples in a multiplex assay.

[0136] In some embodiments, the method, kits and compositions disclosed herein comprise one or more additional primers distinct from the primers of 11-17 nucleotides in length prepared according to the method described above (e.g., see, FIGS. 2A and 11A). These additional primers are can be random primers that are selected without regard to the pathogen of interest to be detected (e.g., random hexamers (N6) or random nonamers (N9)). In one embodiment, the additional primers are random primers having a length of less than ten nucleotides. The additional primers can optionally include one or more modified nucleotides/nucleosides or nucleotide analogs. However, typically the additional primers retain conventional hydrogen base-pair bonding capabilities. In some embodiments, the primers of the disclosure are designed to hybridize to a target sequence in the sample (e.g., particular taxon of pathogens) and are present in an excess as compared to any additional primers (e.g., in the amplification reaction). For example, the primers can be present in a 2:1, 3:1, 4:1, 5:1, 6:1, 7:1, 8:1, 9:1, 10:1, or greater ratio as compared to the additional primers (e.g., random primers). In one embodiment, the primers of the disclosure are present in a 5:1 ratio (e.g., forward primer ratio 5:reverse primer ratio 5:random primer ratio 1). In another embodiment, the primers of the disclosure are present in a 10:1 ratio (e.g., forward primer ratio 5:reverse primer ratio 5:random primer ratio 1).

[0137] In some embodiments, a sample is screened for a particular taxon of pathogenic microorganisms by incubating the sample with a set of primers having lengths that are within a range of 11-17 nucleotides (i.e., 11, 12, 13, 14, 15, 16, or 17 nucleotides) that are optionally ligated or tagged to a nucleic acid adapter under suitable conditions (e.g., hybridization and amplification conditions) such that a plurality of amplified target nucleic acid molecules are generated (e.g., cDNA or DNA molecules). The primers (see, e.g., SEQ ID NOs: 1-96, 399-1562, 1563-3553, and 3554-7324) are combined with PCR reagents under reaction conditions that induce primer extension. For example, primer extension reactions generally include KCl, Tris-HCl, MgCl₂, denatured template nucleic acid, primer, and a polymerase or reverse transcriptase. The PCR usually contains dNTPs, such as dATP, dCTP, dTTP, dGTP, or one or more analogs thereof.

[0138] In some embodiments, the method further comprises incubating the sample in the presence of one or more random primers that are optionally ligated or tagged with the same (or different) nucleic acid adapter. In one embodiment, the method comprises generating a complementary DNA (cDNA) sequence to a target nucleic acid molecule (which corresponds to a particular taxon of pathogens) by reverse transcribing the target nucleic acid molecule by hybridizing one or more of the primers to a complementary nucleic acid sequence present in the sample. In one embodiment, the method further comprises amplifying the cDNA molecules using a nucleic acid adapter in a subsequent amplification reaction. In another embodiment, the cDNA molecules can be directly sequenced using any sequencing assay known in the art to obtain sequencing reads.

[0139] In one embodiment, a sample is screened for a particular taxon of pathogenic microorganisms by incubating the sample with a set of primers having lengths that are typically within a range of 11-17 nucleotides (i.e., 11, 12, 13, 14, 15, 16 or 17 nucleotides), optionally ligated to a nucleic acid adapter, in the presence of one or more random primers, optionally ligated to the same nucleic acid adapter, thereby allowing the primers to hybridize to a complementary nucleic acid sequence in the sample; extending the primers in a template dependent manner thereby generating cDNA; and optionally amplifying the cDNA to obtain a sequencing library. In some embodiments, the sequencing library can be sequenced using any method available in the art to obtain sequencing reads. In one embodiment, the sequencing reads can be filtered to remove adapter nucleic acid sequences, low-quality and/or low-complexity sequences.

[0140] In some embodiments, the methods (and associated kits and compositions) comprise one or more probes. The term “probe” as used herein refers to a molecule (e.g., a protein, nucleic acid, aptamer, etc.) that interacts with or binds to a target. Non-limiting examples of molecules that specifically interact with or specifically bind to a target include nucleic acids (e.g., oligonucleotides or magnetic beads coated with oligonucleotides), proteins (e.g., antibodies, transcription factors, zinc finger proteins, non-antibody protein scaffolds, etc.) and aptamers. Binding typically indicates that the probe binds a majority of the target, assuming an appropriate molar ratio of probe to target. For example, a probe that binds a target molecule typically binds to at least ⅔ of the target molecules in a solution (e.g., 67%, 75%, 80%, 85%, 90%, 91%, 92%, 93%, 94%, 95%, 96%, 97%, 98%, 99%, or 100%). In another embodiment, a probe binds to a target molecule with at least 2-fold greater affinity than non-target molecules, e.g., at least 4-fold, 5-fold, 6-fold, 7-fold, 8-fold, 9-fold, 10-fold, 20-fold, 25-fold, 50-fold, or 100-fold greater affinity. One of skill will recognize that some variability will arise depending on the method and/or threshold of determining binding.

[0141] In some embodiments, any one or more probes, e.g., selected from SEQ ID NOs:98-398 can be used. In some embodiments, the probe can comprise one or more moieties that allow for fluorescent detection of the probe when bound to or interacting with the target. In some embodiments, one or more probes can be added to the sequencing assay optionally, after formation of cDNA molecules (e.g., library preparation) to “pull down” targets having a complementary nucleic acid sequence. In one embodiment, the probe is a bait capture probe (see, e.g., Penalba et al., Mol. Ecol. Res., (2014) 14:1000-10; and xGen target capture probes commercially available from Integrated DNA Technologies, Iowa) (see, e.g., FIG. 11B). In some embodiments, the probes allow for selective enrichment of the target molecules from the sample. In some embodiments, the probe can be attached to a magnetic bead and/or biotinylated.

[0142] The disclosure also contemplates compositions which are useful in practicing the disclosure. Such compositions may include one or more primers or probes disclosed herein. Optionally, the compositions may further include an adapter.

[0143] In one embodiment, the disclosure generally relates to a nucleic acid molecule for detecting a target sequence from a particular taxon of pathogenic microorganisms comprising (a) a primer that is complementary or substantially complementary to the target sequence, wherein the primer is between 11 and 17 nucleotides in length; and (b) a primer set forth in SEQ ID NOs: 1-96, 399-1562, 1563-3553, and 3554-7324. In some embodiments, the composition further comprises an adapter located 5′ of the primer. In one embodiment, the adapter comprises or consists of SEQ ID NO:97.

[0144] In some embodiments, a composition comprising a reaction mixture containing at least one of the primers set forth in SEQ ID NOs: 1-96, 399-1562, 1563-3553, and 3554-7324 and a target sequence is also contemplated.

[0145] The disclosure also contemplates kits which are useful in practicing the disclosure. Such kits may include one or more primers or probes as disclosed herein. Optionally, the kits may include additional primers, probes, instructions, or vessels for one or more components of the kit. The kit may also include buffers and any other reagents that facilitate the method.

[0146] In one embodiment, the disclosure provides a kit for detecting the presence of a pathogen in a sample from a subject based on the presence of a sequencing read derived from the sample. In some embodiments, a first portion of the sequencing read aligns with a first reference genome, which corresponds to a particular taxon of pathogens. In some embodiments, a second portion of the sequencing read aligns with a second reference genome, which corresponds to a different taxon of pathogens.

[0147] In one embodiment, the disclosure generally relates to a kit comprising at least one primer set forth in SEQ ID NOs: 1-96, 399-1562, 1563-3553, and 3554-7324. In one embodiment, the kit is based on the presence or absence of a target sequence (or complement thereof) corresponding to a nucleic acid sequence present in the genome of a particular taxon of pathogens. In some embodiments, the target sequence corresponds to a genomic region of at least one species from the particular taxon of pathogens. In one embodiment, the target sequence corresponds to a reverse transcriptase (RT) region of a gene present in the genome of a particular taxon of pathogens.

[0148] In some embodiments, presence of the taxon of pathogenic microorganisms is determined by amplifying a region of a gene from the particular taxon of pathogenic microorganisms using gene-specific primers having lengths that are typically within a range of 11-17 nucleotides, and aligning a first portion of the target sequence against a first reference genome, wherein the gene-specific primers are any of the primers set forth in SEQ ID NOs: 1-96, 399-1562, 1563-3553, and 3554-7324. In another embodiment, presence of the particular taxon of pathogenic microorganisms is determined by amplifying a region of a gene from the pathogen using gene-specific primers having lengths that are typically within a range of 11-17 nucleotides, and aligning a second portion of the target sequence against a second reference genome, wherein the gene-specific primers are any of the primers set forth in SEQ ID NOs: 1-96, 399-1562, 1563-3553, and 3554-7324. In yet another embodiment, presence of the particular taxon of pathogenic microorganisms is determined by amplifying a target sequence in the sample using primers having lengths that are typically within a range of 11-17 nucleotides, aligning a first portion of the target sequence against a first reference genome, and aligning a second portion of the target sequence against a second reference genome, wherein the primers are any of the primers set forth in SEQ ID NOs: 1-96, 399-1562, 1563-3553, and 3554-7324.

[0149] In one embodiment, the kit further comprises an adapter. In one embodiment, the adapter is positioned 5′ of the primer. In some embodiments, the adapter comprises or consists of SEQ ID NO:97. In one embodiment, the kit further comprises one or more additional primers and/or probes. In one embodiment, the additional primers can comprise a random hexamer or a random nonamer. In one embodiment, the one or more probes can be included. For example, one or more probes can comprise any one or more of the probes selected from SEQ ID NOS:98-398.

[0150] In another embodiment, absence of the particular taxon of pathogenic microorganisms can be determined using a set of primers using any of the primers set forth in SEQ ID NOs: 1-96, 399-1562, 1563-3553, and 3554-7324, amplifying nucleic acids in the sample, and determining that none of the amplified nucleic acids align across a region of at least 10 to 50 nucleotides of a reference genome that corresponds to the particular taxon of pathogens.

[0151] In some embodiments, each of the primers is provided in a separate container, and the kit further includes an additional container having additional primers that are non-specific to the particular taxon of pathogenic microorganisms or different taxon of pathogenic microorganisms or random primers. In another embodiment, a solution or dry mix of pooled primers is provided in a single container, and the kit further includes additional primers (e.g., in the same or different container) that are non-specific to the particular taxon of pathogenic microorganisms or different taxon of pathogenic microorganisms or random primers.

[0152] In various embodiments, the kit includes at least one primer having a nucleotide sequence of comprising or consisting of any one of the primers set forth in SEQ ID NOs: 1-96, 399-1562, 1563-3553, and 3554-7324. In another embodiment, the kit includes at least two primers comprising or consisting of any of the primers set forth in SEQ ID NOs: 1-96, 399-1562, 1563-3553, and 3554-7324. In yet another embodiment, the kit comprises at least one forward primer as set forth in SEQ ID NOs: 1-96, 399-1562, 1563-3553, and 3554-7324 and at least one reverse primer comprising or consisting of a reverse primer set forth in SEQ ID NOs: 1-96, 399-1562, 1563-3553, and 3554-7324.

[0153] In one embodiment, the kit further comprises one or more probes, optionally residing in one or more vessels. In some embodiments, the one or more probes can be selected from any of SEQ ID NOS:98-398.

[0154] One aspect of the disclosure is oligonucleotides useful, e.g., as primers and/or probes, in the methods described herein. In various embodiments, an oligonucleotide of the disclosure has a nucleotide sequence consisting of sequence set forth in SEQ ID NOs: 1-96, 399-1562, 1563-3553, and 3554-7324.

[0155] Any of the computer systems mentioned herein may utilize any suitable number of subsystems. Examples of such subsystems are shown in FIG. 9 in computer apparatus 10. In some embodiments, a computer system includes a single computer apparatus, where the subsystems can be the components of the computer apparatus. In other embodiments, a computer system can include multiple computer apparatuses, each being a subsystem, with internal components.

[0156] The subsystems shown in FIG. 9 are interconnected via a system bus 75. Additional subsystems such as a printer 74, keyboard 78, storage device(s) 79, monitor 76, which is coupled to display adapter 82, and others are shown. Peripherals and input/output (I/O) devices, which couple to I/O controller 71, can be connected to the computer system by any number of means known in the art, such as serial port 77. For example, serial port 77 or external interface 81 (e.g. Ethernet, Wi-Fi, etc.) can be used to connect computer system 10 to a wide area network such as the Internet, a mouse input device, or a scanner. The interconnection via system bus 75 allows the central processor 73 to communicate with each subsystem and to control the execution of instructions from system memory 72 or the storage device(s) 79 (e.g., a fixed disk), as well as the exchange of information between subsystems. The system memory 72 and/or the storage device(s) 79 may embody a computer readable medium. Any of the values mentioned herein can be output from one component to another component and can be output to the user.

[0157] A computer system can include a plurality of the same components or subsystems, e.g., connected together by external interface 81 or by an internal interface. In some embodiments, computer systems, subsystem, or apparatuses can communicate over a network. In such instances, one computer can be considered a client and another computer a server, where each can be part of a same computer system. A client and a server can each include multiple systems, subsystems, or components.

[0158] It should be understood that any of the embodiments of the present invention can be implemented in the form of control logic using hardware (e.g., an application specific integrated circuit or field programmable gate array) and/or using computer software with a generally programmable processor in a modular or integrated manner. As user herein, a processor includes a multi-core processor on a same integrated chip, or multiple processing units on a single circuit board or networked. Based on the disclosure and teachings provided herein, a person of ordinary skill in the art will know and appreciate other ways and/or methods to implement embodiments of the present invention using hardware and a combination of hardware and software.

[0159] Any of the software components or functions described in this application may be implemented as software code to be executed by a processor using any suitable computer language such as, for example, Java, C++ or Perl using, for example, conventional or object-oriented techniques. The software code may be stored as a series of instructions or commands on a computer readable medium for storage and/or transmission, suitable media include random access memory (RAM), a read only memory (ROM), a magnetic medium such as a hard-drive or a floppy disk, or an optical medium such as a compact disk (CD) or DVD (digital versatile disk), flash memory, and the like. The computer readable medium may be any combination of such storage or transmission devices.

[0160] Such programs may also be encoded and transmitted using carrier signals adapted for transmission via wired, optical, and/or wireless networks conforming to a variety of protocols, including the Internet. As such, a computer readable medium according to an embodiment of the present invention may be created using a data signal encoded with such programs. Computer readable media encoded with the program code may be packaged with a compatible device or provided separately from other devices (e.g., via Internet download). Any such computer readable medium may reside on or within a single computer program product (e.g. a hard drive, a CD, or an entire computer system), and may be present on or within different computer program products within a system or network. A computer system may include a monitor, printer, or other suitable display for providing any of the results mentioned herein to a user.

[0161] Any of the methods described herein may be totally or partially performed with a computer system including one or more processors, which can be configured to perform the steps. Thus, embodiments can be directed to computer systems configured to perform the steps of any of the methods described herein, potentially with different components performing a respective step or a respective group of steps. Although presented as numbered steps, steps of methods herein can be performed at a same time or in a different order. Additionally, portions of these steps may be used with portions of other steps from other methods. Also, all or portions of a step may be optional. Additionally, any of the steps of any of the methods can be performed with modules, circuits, or other means for performing these steps.

### EXAMPLES

### Example 1

[0162] Aspects of the disclosure are illustrated in the following Examples. Efforts have been made to ensure accuracy with respect to numbers used (e.g., amounts, concentrations, percent changes, and the like) but some experimental errors and deviations should be accounted for. Unless indicated otherwise, temperature is in degrees Celsius and pressure is at or near atmospheric. It should be understood that these Examples are given by way of illustration only and are not intended to limit the scope of what the inventors regard as various aspects of the present disclosure.

[0163] From December 2015, serum samples from all suspected ZIKV cases detected through passive surveillance from the 35 Mexican Social Security Institute (IMSS) delegations nationwide (located in 32 Mexican states) were submitted for ZIKV diagnosis to the Central Laboratory of Epidemiology (CLE), IMSS in Mexico City. All cases met the following suspect case definition: a person of any age who present exanthema accompanied by two or more of the following symptoms: fever, headache, conjunctivitis, arthralgia, myalgia, edema, pruritus and retroocular pain plus living in or having travelled to, within two weeks of fever onset, an area endemic for Aedes aegypti or A. albopictus with confirmed cases within the locality. Using red cap tubes (without anticoagulant), 5 mL of peripheral blood were taken by venipuncture of the inside part of the elbow, from which 2 to 3 mL of serum were obtained and sent under refrigeration conditions (2-8° C.) to the Central Laboratory of Epidemiology of IMSS in compliance with International Air Transport Association (IATA) triple packaging standards. All samples were taken during the acute phase of the disease (0-5 days following symptom onset).

[0164] ZIKV diagnosis by qRT-PCR was made according to guidelines from the National Institute of Diagnosis and Epidemiological Reference (InDRE) of Mexico. Forward and reverse primers (ZIKV 1086 and ZIKV 1162c, respectively) and Carboxyfluorescein (FAM)-labelled probes (ZIKV 1107-FAM) were used.

[0165] Viral RNA was extracted from 200 μL of patient serum using the QiAmp Viral RNA Extraction Kit (Qiagen, Hilden, Germany). The presence of ZIKV RNA was evaluated using QuantiTec Probe RT-PCR kit (Qiagen). Each reaction consisted of 12.5 μL of 2× reverse transcription master mix, 0.5 μl of QuantiTect RT mix, 0.25 μL of each primer (1 μM final concentration), 0.154 of probe (0.15 μM final concentration), 6.35 μL of water and 5 μL of RNA. Using the Applied Biosystems 7500 Fast system (Applied Biosystems, Foster City, USA) reverse transcription was carried out at 50° C. for 30 mins followed by 95° C. for 10 minutes and 45 cycles of 95° C. for 15 seconds and 69° C. for 1 minute. A few ZIKV samples that were borderline positive in Mexico at the time of initial screening were subsequently found to be negative upon repeat testing immediately prior to sequencing.

[0166] ZIKV samples from Mexico were collected as part of the national epidemiological surveillance program of the Mexican Institute of Social Security, which is a branch of the Ministry of Health. Samples along with accompanying clinical and epidemiological data were de-identified prior to analysis, and are thus considered exempt from human subject regulations with waiver of informed consent according to 45 CFR 46.101(b) of the United States Department of Health and Human Services. From December 2015, serum and urine samples were obtained and provided by the California Department of Public Health (CDPH) from 31 returning travelers from Mexico and the Central American Isthmus (El Salvador, Guatemala and Honduras). An additional 6 samples from patients in Roatán, Honduras were provided by the Blood Systems Research Institute (BSRI). These samples were extracted from patients matching the above suspect case definition. Viral nucleic acids were extracted using the EZ1 Virus Mini Kit v2.0 (Qiagen), and RNA was reverse transcribed using Superscript III Reverse Transcription Kit (Invitrogen). Nucleic acid extracts were subjected to DNase treatment at 37° C. for 30 minutes using Turbo DNase (Thermo-Fisher Scientific) and Baseline-ZERO DNase (Epicentre), followed by qRT-PCR testing for ZIKV.

[0167] RNA integrity was assessed using RNA 6000 Pico kit on the Bioanalyzer (Agilent). A few ZIKV samples that were borderline positive at the CDPH at the time of initial screening were subsequently found to be negative upon repeat qRT-PCR testing immediately prior to sequencing.

[0168] ZIKV samples from the CDPH were de-identified prior to analysis and are considered exempt from human subject regulations. The 6 samples from Honduras were collected under protocols approved by the institutional review boards of the University of California, San Francisco, and Universidad Nacional Autonoma de Honduras. Patients were enrolled and blood collected after obtaining informed consent from patients or their surrogates (parental permission for minors).

[0169] From February 2016, children enrolled in the Nicaraguan Pediatric Dengue Cohort Study, a community-based prospective study of children 2 to 14 years of age that has been ongoing since August 2004 in Managua, Nicaragua, were screened for Zika virus infection. Participants present to the Health Center Sócrates Flores Vivas at the first sign of illness and are followed daily during the acute phase of illness. Acute and convalescent (˜14-21 days after onset of symptoms) blood samples are drawn for dengue, chikungunya and Zika virus diagnostic testing. The case definition for dengue or Zika virus infection for children presenting with an undifferentiated febrile illness or rash with one or more of the following signs and symptoms: conjunctivitis, arthralgia, myalgia, and/or periarticular edema regardless of fever. All suspected Zika cases were confirmed by qualitative RT-PCR of viral RNA in serum and/or urine using triplex assays that simultaneously screen for DENV and CHIKV infections (ZCD assay, CDC Trioplex [https://] [www.fda.gov/MedicalDevices/Safety/EmergencySituations/ucm161496.htm#zika]) or in some cases the CDC ZIKV monoplex assay in parallel with a DENV-CHIKV multiplex assay.

[0170] The Institutional Review Boards of the Nicaraguan Ministry of Health and the University of California, Berkeley approved the study. Parents or legal guardians of all subjects provided written informed consent and subjects ≥6 years old provided assent.

[0171] Short 13-mer primers were designed using an in-house developed computational algorithm (FIG. 2A). Briefly, a multiple sequence alignment of the 44 ZIKV reference genomes available in the National Center for Biotechnological Information (NCBI) GenBank at the time of the design (March 2016) was performed using MAFFT software. The consensus sequence was then partitioned into 250-nt segments, followed by selection of forward and reverse 13-nt primers within 50-nt windows at the edges of each segment. Primers were designed according to the following criteria: (i) no degeneracy, (ii) no self-dimers or cross-dimers with hybridization ΔG<−9 kcal/mol, (iii) no homopolymer repeats >5 nt in length, and (iv) ranked by number of segments covered. Additional primers were designed manually at the 3′ end of the consensus sequence using Primer3. The complete 13-mer ZIKV primer set consisted of 45 forward and 51 reverse primers. Different concentrations of forward and reverse ZIKV primers were mixed with random hexamers at the reverse transcription stage to evaluate ZIKV sequence enrichment.

[0172] Metagenomic next-generation sequencing (mNGS) libraries were generated using Nextera XT kit (Illumina). Libraries were sequenced as 150 base pair (bp) paired-end runs on a HiSeq 2500 instrument (Illumina). Data was scanned for ZIKV reads using the SURPI (sequence-based ultra-rapid pathogen identification) computational pipeline and direct NCBI BLASTn alignment to ZIKV reference genome KJ776791 at an e-value threshold of 1×10⁻⁸. Consensus ZIKV genomes were assembled using the bwa-mem program, by mapping metagenomic ZIKV reads to reference genome KJ776791.

[0173] A subset of mNGS libraries were enriched for ZIKV sequences using xGen biotinylated lockdown bait capture probes (Integrated DNA Technologies) designed to tile across all 44 sequenced ZIKV genomes in GenBank as of March 2016 (FIG. 7). Capture probes were curated for redundancy at a 99% nucleotide similarity cutoff using cd-hit. Enrichment was performed on the mNGS libraries in pools of 8 libraries (including ZIKV-negative serum samples as controls) using the xGen lockdown probe protocol and the SeqCap EZ Hybridization and Wash Kit (Roche).

[0174] A subset of ZIKV infected serum collected from 14 subjects residing in Nicaragua were sequenced using a separate virus-specific-PCR free method previously described for Hepatitis C virus. Total RNA-seq libraries were prepared using the NEB Ultra Directional library kit with adaptations to the manufacturers protocol described elsewhere. By this method, RNA was heat-fragmented, reverse-transcribed using random hexamers then ligated to adapters that bind the manufacturers barcoded-PCR primers. Equal masses of amplified libraries are pooled for hybridization to a mixture of biotinylated 120mer oligonucleotides derived from 60 mer overlapping windows of the complete genome of the ZIKV strain KJ776791 (Integrated DNA Technologies) and captured with streptavidin-conjugated bead (Nimblegen) then PCR amplified to produce the final library for sequencing. The final library was sequenced using a MiSeq (Illumina) instrument using v3 chemistry producing 150 nt paired ends reads. Reads were mapped on KJ776791 reference genome using bwa-mem program to generate consensus genomes.

[0175] Published and available ZIKV coding sequences of the Asian genotype longer than 1500 nucleotides were retrieved from GenBank database as of June 2017. These 298 sequences were aligned together with the new ZIKV sequences generated here using MAFFT. A maximum likelihood (ML) phylogeny was estimated from this alignment using PhyM under a general time reversible nucleotide substitution model, with a gamma distributed among site rate variation and a proportion of invariant sites (GTR+Γ+I), as determined by jModelTest2. Statistical support for nodes of the ML phylogeny was assessed using a bootstrap approach with 100 replicates.

[0176] Temporal evolutionary signal in the alignment was evaluated using TempEst, which plots sample collection dates against root-to-tip genetic distances obtained from the ML phylogeny (see above). The plot indicated that the data set contained sufficient temporal signal for molecular clock analysis. Molecular clock phylogenies were estimated using the Bayesian MCMC approach implemented in BEAST v1.8.4. 4 independent runs of 100 million MCMC steps were computed, sampling parameters and trees every 5000 steps. An uncorrelated lognormal relaxed molecular clock model and a Bayesian skyline coalescent model were used; previous studies have demonstrated this combination to be the best fitting model combination for ZIKV in the Americas.

[0177] In each run, a SRD06 substitution model (Shapiro et al., 2006) was used, which employs a Hasegawa, Kishino and Yano nucleotide substitution model, a gamma distribution among site rate variation (HKY+Γ) and a codon position partition (positions (1+2) versus position 3). A non-informative continuous-time Markov chain reference prior (Ferreira and Suchard, 2008) was placed on the molecular clock rate for all analyses. The program Tracer v1.6 was used to check MCMC chain convergence and to compute marginal posterior distributions of parameters, after removal of 10% of the chain as burn-in. The program logcombiner was used to combine and subsample posterior tree distributions, after a 10% burn-in, thereby generating an empirical distribution of 1,500 molecular clock trees.

[0178] This empirical tree distribution was then used in subsequent phylogeographic analyses to infer ancestral branch locations using the Bayesian asymmetric discrete trait evolution model implemented in BEAST v1.8.4. Lineage movement events were counted among pairs of discrete locations using the robust counting approach. An in-house script was used to identify the earliest estimated ZIKV introductions into new locations from the results of the robust counting method. Viral lineage movement events were statistically supported (with Bayes factors >3) using the BSSVS (Bayesian stochastic search variable selection) approach, as implemented in BEAST version 1.8.4. TreeAnnotator was used to generate a summary maximum clade credibility (MCC) tree from the posterior distribution of trees (after removal of MCMC burn-in of 10%). The MCC phylogeny was drawn using the using ggtree package of the R software platform ([http://] [www.R-project.org/]). Box plots for node ages were generated using the ggplot2 package.

[0179] 104 sequences comprising the Central American clade were analyzed using the serially sampled birth-death skyline model, implemented in BEAST2. 2 independent runs of 100 million MCMC steps were computed and sampled parameters every 10,000 steps. In each run, an uncorrelated lognormal relaxed clock model and a SRD06 substitution model were used, as in the phylogeographic analyses, above. An informative lognormal prior was placed on the molecular clock rate parameter, with mean equal to the median rate from the phylogeographic analyses and standard deviation set to include its 95% highest posterior densities (HPDs). A Laplace distribution was placed on the date of the MRCA with mean equal to the median estimated date in the phylogeographic analyses and scale parameter set to include its 95% HPDs. A lognormal prior with mean of 0 and standard deviation of 1.25 was placed on the effective reproductive number parameter (Rₑ). A Beta prior with α and β set to 1 and 999, respectively, was placed on the sampling proportion. The rate at which patients recover (becoming non-infectious rate) was fixed to 18.25, which corresponds to a mean infectious period of 20 days (this was based on the estimated mean generation time for ZIKV estimated by. The origin time of the Central American epidemic was bounded to be no older than Mar. 1, 2014. A lognormal prior with mean equal to Mar. 1, 2014 and standard deviation of 1 was also placed on the origin time.

[0180] The Rₑ parameter was allowed to change at 9 time points, equally spaced between the TMRCA and the time of the most recent sample. The sampling proportion parameter was assumed to be 0 before the time of the oldest sample and allowed to change at 9 time points, equally spaced between the oldest and most recent samples. The rate at which individuals become non-infectious rate was assumed to be constant through time. To assess the robustness of the estimates of Rₑ with respect to prior assumptions about the sampling proportion the above analyses was repeated with a sampling proportion prior favoring a lower sampling proportion (Beta distribution with α=1, β=9999) and a higher sampling proportion (Beta distribution with α=2, β=99).

[0181] The program Tracer v1.6 was used to check MCMC chain convergence and logcombiner was used to combine and subsample posterior distributions, after the removal of 25% of the chains as burn-in. Figures were produced using the R software platform using in-house scripts and the R-package bdskytools (available at [https://] [github.comiaduplessis/bdskytools]).

[0182] To predict for seasonal variation in the geographical distribution of the ZIKV vector Aedes aegypti in Central America a monthly A. aegypti suitability maps at a 5 km×5 km spatial resolution was used.

[0183] The high-resolution maps were aggregated at the country level. A linear regression model was then used to assess the correlation between monthly A. aegypti predicted climatic suitability and the number of weekly ZIKV notified cases, for each Central America country and for Mexico. This model tests how well vector suitability explains the variation in the number of ZIKV notified cases.

[0184] Genome sequences generated in this study are publicly available in GenBank database under the accession numbers: MF434516-MF434522 and MF801377-MF801426. Sequences of the primers and probes used in genome sequencing in this study are also available as SEQ ID NOs presented herein.

[0185] Serum and urine samples obtained from patients living in, or who had travelled to, Central America or Mexico and who exhibited symptoms consistent with ZIKV infection were screened for ZIKV by real-time quantitative reverse transcription PCR (qRT-PCR). A total of 95 specimens, sampled between January and August 2016, were qRT-PCR positive (59 from Mexico, 16 from Nicaragua, 9 from Honduras, 8 from Guatemala, 3 from El Salvador; FIGS. 1A, 1B). For 52 Mexico samples, the federal states where samples were collected were known (Campeche, Chiapas, Guerrero, Oaxaca, and Yucatan). Positive samples were collected, on average, 2 days after symptom onset, consistent with previous ZIKV studies in Brazil and Colombia. This period likely reflects the narrow 3-day overlap between ZIKV viremia (which persists for ˜9 days after infection) and the onset of symptoms (at ˜6 days after infection). The median cycle threshold (Ct) value of qRT-PCR positive samples was 36, similar to previous studies, and corresponded to a low RNA titer approaching the PCR detection threshold.

[0186] A general method of viral enrichment and genome recovery was developed from clinical samples using metagenomic next-generation sequencing (mNGS) for use in outbreak surveillance. The method is (1) applicable to any targeted virus, regardless of its representation in reference databases (e.g., from 1 to 10,000 genomes), (2) retains broad metagenomic sensitivity for the detection of novel or unexpected pathogens, or co-infections, (3) does not affect overall turnaround times for sample processing, and (4) sufficiently enriches metagenomic libraries to allow robust viral genome recovery from low-titer clinical samples. An automated computational algorithm was developed that takes an arbitrary set of reference genomes and designs a minimal panel of short, 13-nt spiked primers representing these genomes, to be added during the cDNA synthesis step of mNGS library preparation (reverse transcription followed by second-strand synthesis) (FIG. 2A). Following multiple sequence alignment and determination of the consensus sequence, the algorithm generated a set of 45 forward spiked primers and 51 reverse spiked primers for coverage of all 44 ZIKV genomes available in GenBank at the time of design (March 2016).

[0187] Different mixes of random hexamers and/or ZIKV spiked primers (see, FIG. 10) were tested at various ratios using serum samples containing ZIKV at titers of 100, 1,000, and 10,000 copies/mL. Spiked primers were tested with or without incorporation of an 18-nt adapter; the purpose of the adapter was to facilitate downstream PCR amplification using the adapter sequence as a single primer (See, Luk et al, Utility of Metagenomic Next-Generation Sequencing for Characterization of HIV and Human Pegivirus Diversity. PLoS ONE 10(11): e0141723, 2015, which discloses a primer having a random 9-mer linked to a specific 17-mer used to amplify the randomly primed library) and (FIG. 2B). To assess the impact of the spiked primer strategy on metagenomic detection of other infections or co-infections, human immunodeficiency virus, type 1 (HIV-1), hepatitis C virus (HCV), MS2 bacteriophage, and/or T1 bacteriophage were also added at predefined concentrations to the samples.

[0188] Using ZIKV-specific 13-nt spiked primers increased the number of ZIKV reads per million reads (RPM) in nearly all samples, compared to the ZIKV RPM obtained using random primers only; the magnitude of the increase was up to 9.4-fold and 8.9-fold (in metagenomic libraries) using spiked primers with or without an adapter sequence, respectively. Although the degree of enrichment using ZIKV spiked primers containing an adapter sequence was promising at moderate ZIKV titers of 1,000 and 10,000 copies/mL, enrichment was not observed at the lowest titer of 100 copies/mL. In contrast, increases in both RPM (4.9-fold and 8.3-fold increase) and percent genome coverage (1.47-fold and 2.47-fold) were noted at titers of 100 copies/mL using ZIKV spiked primers without an adapter. The greatest impact on genome coverage was seen using 13-nt reverse spiked primers (mixed at a 5:1 ratio of spiked ZIKV-specific to random primers), with 88.6% recovery of the genome at a ZIKV titer of 100 copies/mL, double the coverage obtained using random primers only.

[0189] Notably, the addition of ZIKV spiked primers did not decrease the number of reads from untargeted RNA and DNA viruses in the samples, with the exception of MS2 bacteriophage, for which there was up to a 2-fold decrease in read counts. On average, however, an increase in RPM was observed, with more pronounced enrichment seen for HIV and T1 bacteriophage. Importantly, the genome coverage of HIV and HCV, both epidemic bloodborne pathogens, was not adversely affected by the use of ZIKV spiked primers (FIG. 5A). Other primer combinations tested such as, the use of forward in addition to reverse spiked primers (FIG. 5B), and a higher 10:1 concentration of spiked to random primers (FIG. 5C), were not found to improve overall coverage of ZIKV and untargeted viruses.

[0190] Using reverse 13-nt ZIKV spiked primers (the combination with the best ZIKV genome recovery as discussed above), reads that matched ZIKV in 71 of 81 samples were identified using mNGS. Coverage of the consensus ZIKV genomes generated from each sample ranged from 2% to 100%, with an average of 64%. Further probe enrichment for ZIKV genome recovery was attempted on 10 samples, whose original genome coverage ranged from 9 to 73%. Probe enrichment succeeded in all cases, with an average gain of 10% [0.1%-22%] genome coverage.

[0191] A further 14 Nicaraguan ZIKV samples were processed by a separate laboratory using an alternative mNGS method employing probe capture of metagenomic libraries without the use of spiked primers for reverse transcription. Coverage of the consensus ZIKV genomes generated from the Nicaraguan samples ranged from 1% to 100%, with an average of 47%.

[0192] Many sequenced samples had low genome coverage. Coverage was highly variable for samples with Ct values >30 and missing regions appeared to be randomly distributed across the ZIKV genome (FIG. 1C). To ensure a minimum level of information for phylogenetic analysis, only ZIKV sequences with genome coverage >30% were retained, resulting in a final dataset of 61 sequences with an average coverage of 82.6% (FIG. 1C).

[0193] The mNGS approach enables concurrent detection of multiple pathogens. While performing mNGS analysis using ZIKV spiked primers for genome recovery, a dengue virus 1 (DENV1) infection was detected in a traveler returning from Tahiti with suspected ZIKV infection. Full DENV1 genome coverage was obtained directly from mNGS data, and the strain most closely matched isolates from Vietnam (see, FIG. 6). Four reads aligning totorque teno virus (TTV) in the family Anelloviridae were also identified in a ZIKV-infected patient from Mexico. TTV is not thought to be pathogenic to humans (Okamoto H. Curr. Top. Microbiol. Immunol., 331:1-20 (2009)). Reads matching Papillomaviridae were found in 42 of 81 samples and may be due to skin contamination introduced during sample collection. Contaminant viral reads matching known cultured viruses in the lab, such as human pegivirus 2, were also detected (data not shown).

[0194] Weekly suspected ZIKV cases from Central American countries and confirmed cases for Mexico from 2015 to 2017 were extracted from Pan American Health Organization (PAHO) epidemiological reports (June 2017; FIG. 3). The date of first detection of ZIKV in each country ranged from November 2015 in El Salvador, to May 2016 in Belize. Countries reported a variety of epidemic trajectories. Costa Rica, Mexico and Nicaragua exhibited one epidemic in mid-2016, while two peaks in transmission were observed in Belize, Honduras and Guatemala. Suspected cases in El Salvador peaked only once, at the beginning of January 2016, while those in Panama showed no clear temporal pattern during 2016. These data should be interpreted cautiously because (i) case reporting will vary among countries, (ii) syndromic surveillance may not be able to distinguish between ZIKV and other viruses, such as DENV, with similar symptoms, and (iii) reporting intensity may vary through time, e.g. during national holidays.

[0195] To better understand these temporal patterns, each country was computed in order a measure the environmental suitability for the vector Aedes aegypti through time. The score was derived from monthly temperature, relative humidity, and precipitation data, as previously described. High climatic suitability scores were observed between May and October for most Central American countries (Belize, Guatemala, Honduras, El Salvador, Nicaragua) and Mexico. Honduras was found to have the highest average suitability (FIG. 3). Vector suitability scores in Costa Rica and Panama were typically lower and exhibited less seasonal variation. For Mexico, the suitability score represented only those 11 federal states that correspond to 95% of suspected ZIKV cases (Chiapas, Colima, Guerrero, Hidalgo, Morelos, Nuevo Leon, Oaxaca, Quintana Roo, Tabasco, Veracruz, and Yucatan).

[0196] A strong association between estimated vector suitability and weekly suspected ZIKV cases were observed for Mexico, Nicaragua and Costa Rica (R²>0.5; P<0.001; FIG. 3), as previously reported for Brazil. However, Belize, El Salvador, Guatemala, Honduras and Panama did not show such an association (R²<0.3; P>0.01; FIG. 3). Suspected cases peaked twice in Belize, Guatemala and Honduras, once between May and November (corresponding to the annual peak of mosquito suitability) and once between November and March. Unexpectedly, this latter rise in cases corresponded to low predicted vector suitability, and was also observed in El Salvador.

[0197] The sequence alignment used for phylogenetic analyses comprised the 61 ZIKV sequences generated here, plus 298 published and available sequences, as of June 2017. a maximum likelihood (ML) phylogeny with bootstrap node support values was first estimated (FIG. 3B). This tree revealed that 102 of the 107 ZIKV sequences from Central America and Mexico fell into a single monophyletic clade (clade B in FIG. 3B; bootstrap score=65%), which also contained two sequences from the USA. This Central America and Mexico clade was most closely related to ZIKV sequences from Brazil (clade A in FIG. 3B). Four ZIKV sequences from Panama and one from Mexico did not fall within clade B and were instead placed within a different clade (clade C in FIG. 3B; bootstrap score=85%). Within clade C, Panama sequences were most closely related to those from Colombia, whereas the Mexico sequence group was related to strains from Martinique. Thus, ZIKV had been introduced to Central America and Mexico (CAM) from other locations on multiple occasions, but most CAM infections descended from just one importation event (clade B).

[0198] A regression of genetic divergence against sampling time confirmed that the data set was suitable for molecular clock analysis (FIG. 3B; R²=0.65). To reconstruct the dissemination of ZIKV within Central America and Mexico, a well-established Bayesian molecular clock phylogeographic approach was used. The resulting maximum clade credibility tree was largely consistent with previous studies (FIG. 4A) and with the ML phylogeny (FIG. 3B). As before, most sequences from CAM were placed in a single clade (clade B in FIG. 4A; posterior probability=1.0). The date of the most recent common ancestor (MRCA) of clade B was estimated to be December 2014 (FIG. 4A; 95% HPD=September 2014-March 2015), diverging from Brazilian strains around July 2014 (node A in FIG. 4A; 95% HPD=March 2014-November 2014; posterior probability=0.8). Hence, clade B lineage was estimated to be exported from Brazil to Central America between July and December 2014. This timescale was approximately three months earlier than in previous studies, a refinement likely due to the larger number of strains from CAM included in the current analysis. Four ZIKV strains from Panama and Mexico did not result from the clade B introduction and were instead likely introduced from Colombia or the Caribbean during the second half of 2015 (clade C; FIG. 4A).

[0199] A discrete trait analysis was used to infer the ancestral location of each phylogeny branch. This indicated that the most likely location of the common ancestor of clade B was Honduras (FIG. 4A; posterior probability=0.97). This result was unlikely to be an artefact of sampling intensity because clade B contained more sequences from Mexico (n=47) than from Honduras (n=31) and because randomly subsampling of the dataset confirmed that this was the most likely scenario (FIG. 7). Despite being smaller and less populous than Mexico, Honduras accounted for >50% of all suspected ZIKV cases in the CAM region (WHO 2017) and exhibited the highest average environmental suitability for ZIKV vectors (FIG. 3). The phylogeographic analysis estimated that ZIKV was introduced to Honduras from Brazil around July-September 2014 (FIG. 4B), coinciding with high environmental suitability for Aedes aegypti mosquitoes across Honduras (FIG. 4B). It was found that subsequent dissemination of ZIKV to Guatemala and Nicaragua and to Southern Mexico likely occurred during early 2015, when vector suitability in Honduras was declining (FIG. 4B). The state-level sampling of viruses from Mexico indicated that ZIKV was most likely first introduced into Mexico (from Honduras) via the southern state of Chiapas. The reconstruction suggested that ZIKV subsequently spread within Mexico, from Chiapas to Oaxaca and Guerrero states, and that this within-country movement occurred in mid-2015 (FIG. 4B).

[0200] The Bayesian birth-death skyline model was used to estimate temporal changes in Rₑ, the effective reproductive number of the CAM clade of ZIKV, directly from sequence data (FIG. 4C). For each point in time, Rₑ represented the average number of secondary infections caused by a case (hence Rₑ>1 and Rₑ<1 represented epidemic growth and decline, respectively). Four periods of epidemic growth (estimated Rₑ>1; red dotted line in FIG. 4C) were observed within 2015 and 2016, although only the second and fourth periods were statistically significant (i.e., posterior probability that Rₑ>1 is >=95%). The first period coincided with ZIKV spread from Honduras to other CAM countries. The second growth period, during mid-2015, reached a median Rₑ>2 and coincided with the predicted annual peak of mosquito suitability in Honduras (FIG. 4C). This second period corresponded to a rapid radiation of ZIKV lineages in clades B and C (FIG. 4A) and preceded the first reported cases of ZIKV in Central America and Mexico. The third growth period occurred immediately prior to the rapid increase in reported ZIKA cases in Honduras in early 2016, when the predicted vector suitability was low (FIG. 3). The fourth period corresponded to the epidemic observed during April-July 2016 in all countries except El Salvador and Panama (FIG. 3).

[0201] In the study, the genetic diversity and transmission history of ZIKV in Central America and Mexico was discovered, and a “spiked primer” enrichment strategy was developed for low-titer viral genome recovery from clinical samples. 61 complete and partial ZIKV genome sequences were reported, representing infections from returning travelers to the USA and autochthonous infections of residents of Mexico, Nicaragua, Honduras, Guatemala, and El Salvador. Using a combination of phylogenetic, epidemiological, and environmental data, the introduction and spread of ZIKV in Central America and Mexico were revealed. The “spiked primer” enrichment strategy was also demonstrated was suitable for elucidated the capacity for metagenomic detection of pathogenic microorganisms other than ZIKV, as well as co-infections, and may thus constitute a generalizable approach for rapid genomic surveillance of future outbreaks. The enrichment strategy demonstrated herein for pathogen detection could also be used to facilitate whole-genome sequencing of pathogens, antiviral resistance, virulence characterization, and pathogen discovery.

[0202] Robust viral genome sequence recovery from low-titer clinical samples is a substantial technical challenge for viral genomic epidemiology. ZIKV is difficult to sequence given the brief period of detectable viremia and relatively lower viral titers in returning travelers, for whom medical care is often delayed. Here, short 13-nt spiked primers and/or oligonucleotide capture probes were used to sufficiently enrich low-titer clinical samples for genome recovery by metagenomic next-generation sequencing. Short 13-nt primers used for reverse transcription have the advantage of being less affected by self- and cross-dimerization, which can lead to preferential PCR amplification that often hinders multiplexed PCR designs. Moreover, while typical multiplex PCR requires co-operative primer pairs with well-matched hybridization properties, with short primers, cDNA strands are primed at lower temperatures and thus should be more tolerant of primer-target mismatches. Oligonucleotides used for bait capture are even more lenient because they require no exact match at their 3′ terminus. Consequently, spiked primer and probe-based enrichment approaches can detect and sequence diverse strains of a target virus, whereas multiplexed PCR is generally lineage-specific.

[0203] A metagenomic approach for infectious disease diagnosis and surveillance, such as the spiked primer strategy reported here, could be particularly useful in outbreak settings. Accurate identification of the causative pathogen is important for targeted treatment and containment to prevent transmission. A metagenomic approach that can identify co-infections and other infectious agents is particularly useful if pathogenic microorganisms co-circulate in the outbreak region. For example, nearly 25% of suspected Ebola virus patients in Liberia in 2014-15 were found to be infected with Plasmodium falciparum malaria instead.

[0204] Spiked primers for target enrichment as demonstrated herein, did not increase overall sample turnaround time for metagenomic sequencing, unlike bait capture oligonucleotide probes, which are more costly and incur additional hybridization times ranging from 6-24 hours. Finally, spiked primer sets can be pooled for differential diagnosis of febrile illness from pathogenic microorganisms co-circulating within a given area (e.g., an “arboviral” panel consisting of ZIKV, DENV, CHIKV, and West Nile Virus) or to broadly capture viral diversity (e.g., sequencing of diverse HIV-1 strains in Africa).

[0205] A perennially warm and humid climate makes many locations in Central America and Mexico (CAM) susceptible to mosquito-borne diseases. The first ZIKV cases in CAM were reported in November 2015, about one year earlier than the inferred date of introduction of ZIKV in the region (FIGS. 4A and B). The phylogenetic analyses show that ZIKV was introduced into CAM multiple times, but only one such introduction has become epidemiologically dominant and spread between countries in the region. This lineage (clade B; FIG. 4A) was inferred as originating from Brazil, where ZIKV transmission is thought to have been established since early 2014. The introduction into Honduras likely occurred in mid-2014, when the country had a notably high predicted environmental suitability for ZIKV vectors (FIG. 3 and FIG. 4B). Thus, ZIKV circulated in CAM for at least a year before being first detected there in November 2015, corroborating previous reports of undetected ZIKV spread in this and other regions in the Americas. The analysis suggests that ZIKV spread from Honduras to other countries in Central America and Mexico between late 2014 and early 2015, when predicted mosquito suitability in Honduras was declining (FIG. 4B). Alternatively, if current data underestimates the genetic diversity of ZIKV in Honduras, then dissemination events from Honduras may have been more numerous and some could be more recent (i.e., during mid-015), when predicted vector suitability was higher. Both scenarios are consistent with the reported presence of ZIKV in Southeastern states of Mexico in January-March 2015.

[0206] Time lags between the estimated date of ZIKV introduction into a location, and its date of first detection, have been reported across the Americas, including in regions with established surveillance systems. Early detection of ZIKV was rendered difficult by a large number of asymptomatic patients, and the similarity between ZIKV-associated symptoms and those of other arboviruses, particularly DENV and CHIKV. New surveillance methods, such as large-scale active mosquito trapping, could provide timely information that could inform epidemic response and control interventions.

[0207] Multiple lines of evidence point to complex annual trends in ZIKV transmission in CAM, contrasting with a single transmission season observed in other locations. Firstly, reported suspected ZIKV cases in 2016 and 2017 peak twice a year in Belize, Honduras and Guatemala (FIG. 3) and a 2016 winter epidemic was reported in El Salvador. Winter transmission is notable because, at that time, predicted climatic suitability for ZIKV vectors was low (FIG. 3). Secondly, the time series of qRT-PCR positive samples exhibits two waves within 2016; a larger wave in spring and summer dominated by samples from Mexico and Nicaragua, and a smaller winter wave comprising samples from the Atlantic island of Roatán in Honduras, Guatemala, El Salvador, Nicaragua and elsewhere (FIGS. 1A and 1B). Thirdly, genetic estimates of the ZIKV clade B effective reproductive number (Rₑ) (FIG. 4C) reveal periods of epidemic growth approximately every six months. Lastly, ZIKV lineage movements among countries also occur in both winter and summer (FIG. 4B). Although each of these observations carries substantial uncertainty, their convergence is striking, and there is evidence for sustained transmission of CHIKV in Honduras in January-March 2015, in addition to a CHIKV epidemic there later in the year.

[0208] The reasons for these epidemiological trends remain unclear and a number of hypotheses can be put forward: (1) it is possible that ZIKV cases were over-reported in some locations in late-2015, perhaps due to heightened awareness immediately following the first suggestions of a link between ZIKV and microcephaly; (2) ZIKV introduction into a wholly susceptible population might generate substantial transmission even when vector abundance is comparatively low. If true, this implies that little herd immunity accumulated in the CAM region during 2014 and 2015; (3) trends in predicted vector suitability at the national level may hide strong local environmental heterogeneity; for example, between highlands and lowlands, and between the Pacific and Atlantic coasts. Brooks et al., (2017) reported a February 2016 peak in ZIKV cases on Roatán island, Honduran Bay, whose climate differs from the Honduran mainland. Some locations may also be capable of sustaining year-round transmission; (4) the contribution of latent infection and sexual transmission to ZIKV incidence is currently not well characterized, and requires further investigation. However, sexual transmission is unlikely to cause a large proportion of reported cases (see, FIG. 3).

### Example 2

[0209] Clinical ZIKV serum samples from Mexico were collected as part of the national epidemiological surveillance program of Instituto Mexicano del Seguro Social (IMSS), a branch of the Ministry of Health, as previously described. Samples along with ancillary clinical and epidemiological data were de-identified prior to analysis, and are thus considered exempt from human subject regulations with waiver of informed consent according to 45 CFR 46.101(b) of the United States Department of Health and Human Services. Analysis of whole blood samples from patients with Ebola virus disease was approved by the Ministry of Health in the Democratic Republic of the Congo. Patients in the 2014 Boende EBOV outbreak from Aug. 13, 2014 to Sep. 8, 2014 and in the 2018 North Kivu EBOV province outbreak (Aug. 1, 2018 to present) provided oral consent for study enrollment and collection and analysis of their blood. Consent was obtained at the homes of patients or in hospital isolation wards by a team that included staff members of the Ministry of Health. Plasma samples from patients with HIV-1 and/or Usutu virus infection were provided by the Abbott Global HIV-1 Surveillance Program. Briefly, informed consent was obtained for collection of HIV-1 infected blood donations from blood banks in Cameroon and analysis for viral load determination and sequencing under protocols approved by local ethics committees. Clinical samples were analyzed at University of California, San Francisco (UCSF) under protocols approved by the UCSF Institutional Review Board (protocol #11-05519).

[0210] Clinical sample collection. Viral cultures of ZIKV (Uganda strain), DENY (type 1), and MS2 bacteriophage were purchased from American Type Culture Collection (ATCC, Manassas Va., USA). Ebola cultures Kikwit strain in TRIzol LS (Thermo Fisher Scientific, Waltham, Mass., USA) was provided by Dr. Jean Patterson at Texas Biomedical Research Institute (San Antonio, Tex.). Clinical ZIKV serum samples were collected by Central Laboratory of Epidemiology (CLE), IMSS in Mexico City, Mexico. Real-timez quantitative reverse transcription PCR (RT-PCR) testing was used for ZIKV detection and viral titer determination by standard curve analysis. Forward and reverse primers (ZIKV 1086 and ZIKV 1162c, respectively) and Carboxyfluorescein (FAM)-labelled probes (ZIKV 1107-FAM) were used as previously described. Clinical Ebola samples collected from patients in the 2014 Boende and 2018 North Kivu province outbreaks were provided by Dr. Placide Mbala and colleagues at INRB in Kinshasa, DRC. Clinical HIV and hepatitis C plasma samples were obtained from the UCSF Clinical Microbiology Laboratory (San Francisco, USA). The CSF sample from a patient with POWV meningoencephalitis was provided by Boston Children's Hospital. The CSF sample from a patient from SLEV meningoencephalitis was provided by University of California, Los Angeles (UCLA) Medical Center. Negative plasma sample matrix used as a “no template” control (NTC) was obtained from Golden West Biologicals Inc. (Temecula, Calif., USA).

[0211] MSSPE viral spiked primer design. Multiple sequence alignment (MSA) of viral genomes (downloaded from NCBI GenBank as of September 2017) was performed using MAFFT at default parameters (algorithm=“Auto”, scoring matrix=“200PAM/k=2”, gap open penalty=1.53, offset value=0.123). An in-house bioinformatics pipeline named “MSSPE-design” was developed on an Ubuntu Linux computational server for automated design of spiked primers. Briefly, the MSA-aligned genomes were partitioned into overlapping 500 nucleotide (nt) segments with 250 nt overlap using PYFASTA ([http://] [pypi.python.org/pypi/pyfasta/]). Forward or reverse 13 nt primers were selected from 50 nt regions at the ends of each segment by iteratively ranking candidate 13mer (“k-mer”) sequences in reverse order by frequency, selecting the top kmer shared by the most segments and not containing any ambiguous nucleotides, and then removing segments sharing that 13mer before repeating the process on the remaining segments. To decrease overall spiked primer costs, the iterations were repeated until the number of remaining segments containing a shared kmer was below a pre-designated threshold (ranging from n=1 for viruses with only a limited number of genomes/genome segments such as CCHF to n=10 for viruses comprising thousands of genomes and multiple genotypes such as DENV). Spiked primers were filtered by removal of primers with melting temperatures (Tm) greater than 2 standard deviations from the mean or that were predicted to self-dimerize or cross-dimerize with a ΔG value of −9 kcals/mol or more negative.

[0212] Spiked primers were ordered and synthesized by Integrated DNA Technologies Inc. (IDT, Coralville, Iowa, USA). Forward or reverse spiked primer oligonucleotides targeting individual viruses were synthesized on a 10 nmole scale in 96-well plates with standard desalting and 6 nm of each individual oligonucleotide were mixed and then resuspended to a final volume of 500 μL in IDTE pH 8.0. Spiked primer panels (ArboV, HFV, and A11V) were designed by mixing the spiked primers for each individual virus in equimolar ratios and then diluting with TE (Tris-EDTA) buffer to the desired concentration. The estimated cost per reaction for individual virus-specific primers was $0.06-$0.08, and average cost per reaction for spiked primer panels was $0.17-$0.34.

[0213] Construction of metagenomic sequencing libraries. Viral RNA was extracted from 200 μL of contrived or clinical patient samples using the EZ1 Advanced XL BioRobot and EZ1 Virus Mini Kit (Qiagen, Redwood City, Calif.), with the exception of EBOV RNA, which was extracted manually in the viral hemorrhagic fever reference laboratory in INRB, Kinshasa using the Direct-zol RNA MiniPrep Kit (Zymo Research, Irvine, Calif.). 25 μL of nucleic acid extract was treated with DNase (3 μL Turbo DNase, 1 μL Baseline, 5 μL Turbo buffer and 16 μL nuclease-free water), and incubated on an Eppendorf ThermoMixer at 37° C., 600 rpm for 30 min. The Zymo RNA Clean and Concentrator kit (Zymo Research, Irvine, Calif.) was used to clean up DNase-treated RNA, and the final RNA was eluted in 32 μL water. The RNA was then mixed with random hexamer (RH) alone (1 μM) or spiked primer plus RH in a 10:1 ratio of spiked primer to RH, and heated to 65° C. for 5 min. The reverse transcription master mix (10 μL SuperScript III buffer, 5 μL dNTP of 12.5 mM, 2.5 μL DTT of 0.1M, 1 μL SuperScript III enzyme) was added to each sample and incubated at 25° C. for 5 min, followed by 42° C. for 30 min and 94° C. for 2 min. After cooling to 10° C., a second-strand synthesis master mix (3.7 μL Sequenase buffer, 0.225 μL Sequenase enzyme and 1.1 μL water) was added to each reaction, followed by a slow 2 min ramp to 37° C. and 8 min incubation. The resulting cDNA was cleaned up using the Zymo DNA Clean and Concentrator kit (Zymo Research, Irvine, Calif.), with the addition of 10 μL linear acrylamide to each sample, and eluted in 10 μL water. Using the Illumina Nextera XT kit, 2.5 μL sample cDNA was incubated at 55° C. for 5 mins in tagmentation mix (10 μL TD buffer and 5 μL ATM enzyme), and immediately neutralized with 2.5 μL NT buffer. 12.5 μL of tagmented DNA was then transferred to reaction tube containing indexing mix (7.5 μL Nextera XT NPM, 2.5 μL N-7xx primer and 2.5 μL S-5xx primer), followed by PCR amplification (72° C. for 3 min, 95° C. for 30 s, followed by 16 cycles of denaturation (95° C. for 10 s), annealing (55° C. for 30 s), and extension (72° C. for 30 s), with a final extension at 72° C. for 5 min). After PCR, 3 μL of PCR product was analyzed by 2% gel electrophoresis to check for library size and band intensity. If no band or only a very faint band was observed on the gel, another round of recovery PCR was performed. For recovery PCR, the library was washed using 0.9× AMPure XT beads (Beckman Coulter, Carlsbad, Calif., USA) and 5 μL clean library was mixed with 45 μL master mix (10 μL buffer, 2.5 μL of 10 uM Nextera general primers, 1 μL dNTP, 0.5 μL Phusion DNA polymerase enzyme and 31 μL water), followed by a 95° C. incubation for 30 s and 10 cycles of PCR (95° C. for 30 s denaturation, 60° C. for 30 s annealing, and 72° C. for 30 s extension), with a final extension at 72° C. for 5 min. The final cDNA library was eluted in 20 μL EB buffer after a wash step using 0.9× AMPure beads.

[0214] Metagenomic sequencing. The cDNA libraries were quantified using the Qubit fluorometer (Thermo Fisher Scientific) and the sizes of the libraries were measured using Agilent Bioanalyzer (Agilent Technologies, Santa Clara, Calif.). Illumina sequencing was performed on a MiSeq instrument using 150 nt single-end runs according to the manufacturer's protocol. For nanopore, amplified cDNA libraries from Nextera library preparation were end-repaired and ligated with adapter and motor proteins using the 1D Ligation Sequencing Kit (Oxford Nanopore Technologies). Metagenomic libraries for nanopore sequencing were run on R9.4 or R9.5 flow cells, using either a MinION MK1B or GridION X5 instrument (Oxford Nanopore Technologies).

[0215] Capture probe enrichment for ZIKV samples. The xGen Lockdown Kit (IDT Technologies, Redwood City, Calif.) was used for capture probe enrichment of ZIKV. Briefly, barcoded amplified cDNA libraries corresponding to each sample were mixed in equimolar proportions to generate a 500 ng pooled library. The pooled library was then added to a hybridization mix containing ZIKV xGen Lockdown probes, and the hybridization reaction was performed by incubation at 65° C. for 16 h, followed by streptavidin bead capture for 45 min. Beads containing captured cDNA were re-suspended in an amplification reaction mix (25 μL KAPA HiFi HotStart ReadyMix, 1.25 μL xGen primer and 3.75 μL water), and post-capture PCR was performed (98° C. for 45 s, followed by 10 cycles of denaturing (98° C. for 15 s), annealing (60° C. for 30 s), and extension (72° C. for 30 s), with a final extension at 72° C. for 1 min). PCR amplicons were purified using 1.5× volume of AMPure XP beads and finally eluted in 20 μL EB buffer. Purified PCR products were analyzed by 2% gel electrophoresis to check library size, and DNA concentration was estimated using the Qubit fluorometer. The capture probe enriched library was run on an Illumina MiSeq instrument using 150 nt single-end runs according to the manufacturer's protocol.

[0216] Tiling multiplex PCR enrichment for ZIKV. Tiling multiplex PCR for ZIKV enrichment was performed according to the “Primal” protocol described by Quick et al., except for libraries prepared using both MSSPE and tiling multiplex PCR, for which an AMPure bead wash of 1.2× was performed immediately after cDNA synthesis (before adding multiplexed primers) to remove residual ZIKV MSSPE primers (4 μM) that had been added during the reverse transcription step. After visualization of a PCR band of the expected size (400 nt) by 2% gel electrophoresis, barcoded sequencing libraries were prepared using the NEBNext Ultra II DNA Library Preparation Kit (New England BioLabs, Inc., Ipswich, Mass.), and sequenced on an Illumina MiSeq instrument using 250 nt paired-end runs according to the manufacturer's protocol.

[0217] Bioinformatics pipelines for viral detection and reference genome alignment. Sequencing data from Illumina MiSeq or HiSeq instruments were analyzed for viruses using the SURPI+ (“sequence based ultra-rapid pathogen identification”) computational pipeline (UCSF), a modified version of a previously published bioinformatics analysis pipeline for pathogen identification from mNGS sequence data. Specifically, the SURPI+ pipeline modifications include (i) updated reference databases based on the NCBI nt database (March 2015 build), (ii) a filtering algorithm for exclusion of false-positive hits from database misannotations, and (iii) taxonomic classification for species-level identification. Viral reads were mapped to reference genome and percent coverage determined an in-house developed SURPIviz graphical visualization interface or Geneious software v10. For virus detection from nanopore reads, an in-house developed pipeline called SURPIrt (SURPI “real-time”, unpublished) was used, which identifies viral reads by Bowtie2 alignment to the NCBI Viral RefSeq database or the viral portion of the NCBI nt database. Viral reads obtained by nanopore sequencing were mapped to reference genomes using GraphMap.

[0218] Quantification and Statistical Analysis. CAL ANALYSIS. The RPM (reads per million) metric was calculated as the number of viral species-specific reads divided by the number of preprocessed reads (reads remaining after adapter trimming, low-quality filtering, and low-complexity filtering of raw reads) for Illumina sequencing, or the number of viral species-specific reads divided by the number of basecalled reads for nanopore sequencing. The fold change for MSSPE enrichment was defined as the RPM obtained for a target virus using MSSPE divided by the RPM obtained using RH priming only. The median fold change is given instead of the mean fold change if the data contained outliers. The percent increase in genome coverage is the genome coverage obtained using RH alone subtracted from that obtained using MSSPE. Chi-squared test was used to compare two proportions, and p value less than 0.05 is considered statistically significant.

[0219] Spiked primer design. A general method for viral enrichment and genome recovery from clinical samples for use in diagnostics, public health surveillance, and outbreak investigation was developed. The method was developed to (i) be applicable for any targeted virus, regardless of its degree of representation in reference databases (e.g., from 60 to 3,571 reference genomes/genome segments) (FIG. 10A), (ii) preserve broad metagenomic sensitivity for comprehensive detection of known and novel pathogenic microorganisms (viral and non-viral) and co-infections, (iii) not affect overall turnaround times for sample processing, and (iv) enrich mNGS libraries sufficiently to allow robust viral genome recovery from low-titer clinical samples. Specifically, an automated computational algorithm was designed which took as input an arbitrary set of reference genomes and constructed a minimal panel of short, 13-nt spiked primers covering these genomes (FIG. 10A), to be added during the cDNA synthesis (reverse transcription step of mNGS library preparation (FIG. 10B). Spiked primers were designed for 14 viruses, in total comprising 6,102 primers and including vector-borne and/or hemorrhagic fever viruses of public health significance.

[0220] MSSPE for viral pathogen detection. First, the enrichment effect of virus-specific spiked primers for ZIKV and West was evaluated. Nile virus (WNV) detection using mNGS on a benchtop sequencing platform (Illumina MiSeq). At a spiked primer concentration of 1 μM, the maximum concentration generally recommended for specific PCR (Lorenz, 2012), the degree of ZIKV enrichment in contrived samples containing ZIKV and either HIV or hepatitis C virus (HCV) as an off-target virus was highest (5-6×) at 5:1 and 10:1 molar ratios of spiked to random hexamer (RH) primers. There was no or minimal loss of detection sensitivity for off-target HIV and HCV; rather, HIV reads were enriched (2.7×) in the presence of ZIKV spiked primers. Increasing the molar ratio of spiked to RH primers to 100:1 from 10:1 did not result in increased enrichment of WNV reads using the arbovirus spiked primer panel (ArboV) at 1 μM concentration (SEQ ID NOs:399-1562). A comparison of spiked primer concentrations of 1 μM, 4 μM, and 10 μM at molar ratios of 10:1 found that the degree of enrichment peaked at 4 μM.

[0221] Next, spiked primer concentrations ranging from 1 μM to 40 μM or 80 μM for enrichment of ZIKV, DENV, EBOV, and off-target MS2 bacteriophage (an RNA virus) using spiked primer panels [arboviruses (ArboV), hemorrhagic fever viruses (HFV), and all viruses (Ally, all viruses with the exception of HCV], aiming to determine the optimal concentration for the panels was tested. The peak performance of the ArboV panel was found at a primer concentration of 10 or 20 μM, yielding an ˜11× enrichment in ZIKV and −5× enrichment in DENV reads (FIG. 11A). Metagenomic detection of off-target viruses (EBOV and MS2 phage) was not impaired; in fact, low-level enrichment was observed (FIG. 11A). The optimal primer concentration for the HFV panel was found to be 20 μM (FIG. 11B), yielding a mean 5× enrichment for EBOV. The A11V panel at the optimal 10 μM primer concentration yielded 3-28× enrichment of ZIKV, DENV, and EBOV reads (FIG. 11C).

[0222] As the degree of enrichment was noted to be higher at lower viral titers (FIGS. 11A and C), virus-specific primers and expanded panels for enrichment of ZIKV, dengue virus (DENV), and EBOV across a 3-log dilution of viral titers (10, 100, and 1,000 copies/mL) were tested. At the previously determined optimal concentration 4 μM and molar ratio of 10:1 spiked to RH primers, enrichment of individual viruses across the 3 concentrations using virus-specific primers ranged from 3×-55×. Across all primer sets, the highest degree of enrichment overall was observed at the lowest titer (˜10-40× at 10 copies/mL), with less enrichment (˜4-15×) at titers of 100 or 1,000 copies/mL (FIGS. 11D-G). Enrichment of EBOV using the HFV panel averaged 11× and enrichment of ZIKV and DENV using the ArboV panel averaged 9× and 5×, respectively (FIG. 11H). Using all 4,792 primers in combination (A11V) yielded ˜12× increases in the number of viral reads for each of the 3 targeted viruses (FIG. 11H).

[0223] The performance of the spiked primer panels was then evaluated on the MinION portable nanopore sequencing platform (Oxford Nanopore Technologies, Oxford, UK) (Table 1). Overall levels of ZIKV, EBOV, and DENV enrichment at viral titers ranging from 10-1,000 copies/mL were comparable for the two platforms (median enrichment of 7.8× on the MinION and 9.2× on the Illumina MiSeq). The use of spiked primer panels enabled detection of ZIKV and EBOV down to 10 copies/mL, near the limits of detection for virus-specific PCR, whereas no ZIKV or EBOV reads were obtained by mNGS using RH primers alone (Table 1).

TABLE 1
Detection of targeted viruses using MSSPE

| | | | Viral | | Fold | | |
|---|---|---|---|---|---|---|---|
| | | | RPM | | change | Viral | Fold |
| | | | (ONT | | (ONT | RPM | Change |
| | Viral titer | | MinION | | MinION | (Illumina | (Illumina |
| Virus | (copies/ml) | Primer type | nanopore) | # of reads | nanopore) | MiSeq) | MiSeq) |
| ZIKV | 10 | RH | 0 | 141,549 | | 0 | |
| ZIKV | 10 | ArboV-SP | 8 | 378,382 | >8.0 | 3.1 | >3.1 |
| ZIKV | 10 | RH | 0 | 131,662 | | 0.68 | |
| ZIKV | 10 | ArboV-SP | 28 | 393,179 | >28 | 11.2 | 16.4 |
| EBOV | 10 | RH | 1 | 810,439 | | 0.27 | |
| EBOV | 10 | EBOV-SP | 14 | 1,140,463 | 14 | 15 | 55 |
| EBOV | 10 | HFV-SP | 2 | 489,000 | 2.0 | 2 | 7.4 |
| EBOV | 100 | RH | 0 | 645,349 | | 8 | |
| EBOV | 100 | EBOV-SP | 108 | 608,429 | >108 | 130 | 16 |
| EBOV | 100 | HFV-SP | 31 | 386,053 | >31 | 53.6 | 6.7 |
| ZIKV | 100 | RH | 31 | 252,145 | | 16 | |
| ZIKV | 100 | ZIKV-SP | 341 | 259,154 | 11 | 247 | 15 |
| DENV | 100 | RH | 42 | 307,846 | | 38 | |
| DENV | 100 | DENV-SP | 62 | 763,017 | 1.5 | 199 | 5.2 |
| DENV | 100 | ArboV-SP | 103 | 202,737 | 2.5 | 141 | 3.7 |
| EBOV | 1,000 | RH | 216 | 244,554 | | 358 | |
| EBOV | 1,000 | EBOV-SP | 6,117 | 472,770 | 28 | 7,563 | 21 |
| ZIKV | 1,000 | RH | 208 | 125,000 | | 66 | |
| ZIKV | 1,000 | ZIKV-SP | 1,570 | 70,000 | 7.5 | 1,238 | 19 |
| ZIKV | 1,000 | ArboV-SP | 1,325 | 81,499 | 6.3 | 740.7 | 11 |
| DENV | 1,000 | RH | 322 | 433,949 | | 240 | |
| DENV | 1,000 | DENV-SP | 1,431 | 338,789 | 4.4 | 1,511 | 6.3 |
| DENV | 1,000 | ArboV-SP | 699 | 520,593 | 2.2 | 945 | 4.0 |

[0224] The performance of the ArboV and HFV panels using clinical blood samples from ZIKV (n=5) and EBOV-infected (n=5) patients from Mexico and DRC (2014 Boende outbreak), respectively. A median viral enrichment of 2.1× was observed, resulting in 10 of 10 (100%) of samples being detected using the Illumina MiSeq platform, versus only 8 of 10 (80%) by mNGS with RH primers alone. Analysis of a subset of samples (n=3) by nanopore sequencing revealed similar levels of enrichment to those obtained on the Illumina MiSeq platform that, in one case, enabled detection of ZIKV in a low-titer clinical sample negative by randomly primed mNGS.

[0225] MSSPE for virus genome sequencing. It was hypothesized that the increased proportion of viral reads obtained using the MSSPE method would improve genome coverage. Using ZIKV spiked primers on plasma samples spiked with 1,000 copies/mL of ZIKV more than doubled the genome coverage obtained using RH primers only, from 35.8% to 72.8%. The performance of virus-specific primers for genome sequencing of ZIKV, DENV, EBOV, HIV-1 (divergent and recombinant strains from Cameroon and DRC, Africa), and HCV (genotypes 2, 4, and 6 from California, United States) were then evaluated. On average, a 49% (±13.9% SD) increase in genome coverage was achieved using spiked primer relative to RH primers only for contrived ZIKV, DENV, HIV and EBOV samples at titers of 100-1,000 copies/mL (Table 2, FIG. 12A), and a 42% (±15.0% SD) increase in genome coverage for clinical HIV-1 and HCV samples at titers ranging from 100-10,000 copies/mL (Table 2, FIGS. 12B and C). Similarly, a 36.5% (±16.8% SD) increase in genome coverage was obtained using spiked primer panels (ArboV, HFV, and AllV) for contrived and clinical samples of ZIKV, DENV, and EBOV. No significant gains in genome coverage were observed at a titer of 10 copies/mL, a finding attributed to insufficient sequencing depth. In addition, the MSSPE method was tested using EBOV and DENV spiked for genome recovery on the MinION nanopore sequencer. With contrived samples at a titer of 1,000 copies/mL, comparable percentage increases in genome coverage were achieved on both ONT MinION nanopore and Illumina MiSeq sequencing platforms (Table 2).

[0226] MSSPE for pathogen discovery. To assess the utility of MSSPE for pathogen discovery, spiked primers were tested which could enrich for sequences from emerging flaviviruses in clinical samples from infected patients. Of note, flaviviruses had not been specifically targeted in the initial spiked primer design. ZIKV spiked primers were used to enrich for St. Louis encephalitis (SLEV), whereas ArboV panel spiked primers were used to enrich for Powassan virus (POWV) in patient cerebrospinal fluid (CSF) samples. The use of ZIKV spiked primers enriched the number of reads to SLEV by ˜3×, with a corresponding increase in 17.5% genome coverage (Table 3). In CSF from a patient with tick-borne POWV meningoencephalitis, the use of ArboV spiked primers enriched for POWV reads by 15× over RH primers alone, and improved viral genome coverage by 43% (Table 3 and FIG. 12D).

TABLE 2
Improved viral genome coverage using MSSPE

| | | | | | | Genome | | Genome | |
|---|---|---|---|---|---|---|---|---|---|
| | | | | | # of viral | coverage | # of viral | coverage | |
| | | Viral titer | | Fold | reads (RH | (RH | reads (spiked | (spiked | % increase in |
| Virus | Strain/subtype | (copies/ml) | Primer type^{a} | enrichment | primers) | primers) | primers) | primers) | coverage |
| ZIKV | Uganda MR766 | 100 | ZIKV-SP | 10.0 | 31 | 23.70% | 309 | 67.2% | 43.5% |
| ZIKV | Uganda MR766 | 100 | ZIKV-SP | 15.4 | 13 | 4.30% | 200 | 44.3% | 40.0% |
| ZIKV | Uganda MR766 | 1,000 | ZIKV-SP | 19.2 | 64 | 46.20% | 1229 | 95.6% | 49.4% |
| HIV-1 | Group M, CRF01 | 100 | HIV-SP | 10.5 | 17 | 12.30% | 179 | 66.4% | 54.1% |
| DENV | type 1 | 100 | DENV-SP | 5.2 | 69 | 29% | 359 | 80.9% | 51.9% |
| DENV | type 1 | 1,000 | DENV-SP | 6.3 | 382 | 67.50% | 2411 | 97.2% | 30.0% |
| EBOV | Ebola Kikwit-95 | 100 | EBOV-SP | 10.5 | 200 | 7.50% | 2095 | 84.9% | 77.4% |
| EBOV | Ebola Kikwit-95 | 1,000 | EBOV-SP | 21.0 | 385 | 45.20% | 8095 | 90.3% | 45.1% |
| Mean (SD) | | | | | | | | | 49 (±13.8%) |
| HIV | CRF01, #8 | 1,000 | HIV-SP | 6.0 | 55 | 21% | 330 | 92% | 71.0% |
| HIV | CRF01, #9 | 1,000 | HIV-SP | 3.1 | 76 | 44.80% | 234 | 83% | 38.2% |
| HIV | CRF01, | 10,000 | HIV-SP | 2.6 | 138 | 67% | 358 | 88% | 21.0% |
| | #18 | | | | | | | | |
| HIV | URF-0201, | 1,000 | HIV-SP | 2.3 | 74 | 47.80% | 167 | 74.6% | 26.8% |
| | #22 | | | | | | | | |
| HIV | URF-0122, | 1,000 | HIV-SP | 8.8 | 11 | 13.50% | 97 | 61.4% | 47.9% |
| | #20 | | | | | | | | |
| HCV | Genotype 2 | 1,000 | HCV-SP | 5.0 | 14 | 11.40% | 70 | 54% | 42.6% |
| HCV | Genotype 4 | 10,000 | HCV-SP | 1.7 | 411 | 33.30% | 707 | 82.8% | 49.5% |
| HCV | Genotype 6 | 1,000 | HCV-SP | 3.0 | 30 | 16.40% | 91 | 55% | 38.6% |

| | |
|---|---|
| Mean (SD) | 42% (±15.3%) |
| Overall mean % increase in coverage | 45.4% (±14.5%) |

TABLE 3
Detection of untargeted emerging or novel viruses using MSSPE

| | | | | | | Genome | | | Genome | % | |
|---|---|---|---|---|---|---|---|---|---|---|---|
| | | | # of | # of viral | Viral RPM | coverage | # of viral | Viral RPM | coverage | increase | |
| | Clinical | Primer | preprocessed | reads (RH | (RH | (RH | reads | (spiked | (spiked | in | Fold |
| Virus | Sample | type | reads | primers) | primers) | primers) | (spiked) | primers) | primers) | coverage | change |
| Usutu | serum | ARboV- | 122,517,964 | 114 | 0.9 | 5.5% | 845 | 6.8 | 23.0% | 17.5 | 7.5 |
| | | SP | | | | | | | | | |
| SLEV | CSF | ZIKV- | 500,000 | 96 | 192 | 67.2% | 288 | 576 | 92.8% | 25.6 | 3 |
| | | SP | | | | | | | | | |
| Powassan | CSF | ArboV- | 11,266,014 | 88 | 7.8 | 39.6% | 1,007 | 114.6 | 82.6% | 43 | 14.7 |
| | | SP | | | | | | | | | |

[0227] An HIV clinical sample was initially found to harbor Usutu virus (USUV), a flavivirus, by MSSPE using HIV-1 spiked primers. Interestingly, the degree of enrichment for USUV using these HIV-1 spiked primers over RH primers alone was 6×; subsequent analysis of the HIV-1 spiked primers found that 18 of them aligned incidentally to the USUV genome with 0 or 1 mismatches (92.3% or 100% identity). Running the same sample on the Illumina MiSeq at a limited throughput of ˜1 million raw reads resulted in detection of no USUV reads with RH primers alone, but 6 reads with the use of ArboV primers. Deeper sequencing on the Illumina HiSeq of ˜123 million reads revealed that the degree of enrichment of USUV reads using the ArboV panel was 7×(Table 3), with a corresponding increase in genome coverage of 25.6%.

[0228] Comparison of MSSPE with other target enrichment methods. A head-to-head comparison of MSSPE was performed with both capture probe and tiling multiplex PCR methods for enrichment of viral reads from ZIKV-positive clinical samples at low titers (310-28,200 copies/mL). The degree of improvement in genome coverage using MSSPE was comparable to capture probe and tiling multiplex PCR methods (Table 4). However, a small amount of cross-contamination was observed using capture probe and multiplex PCR, versus no cross-contamination using MSSPE (Negative control in Table 4). Tiling multiplex PCR for ZIKV was negative when testing a contrived ZIKV sample containing the 1947 prototype Uganda strain (Table 4), likely due to sequence divergence from the Asian lineage reference genomes from the 2014-2016 ZIKV outbreak in the Americas that were used in the initial multiplex PCR primer design.

TABLE 4
Comparison of MSSPE with other target enrichment methods

| | | Titer | RH only | | | MSSPE | | | Capture Probe^{b} |
|---|---|---|---|---|---|---|---|---|---|
| | | in | #of pre- | # of | % of | #of pre- | # of | % of | #of pre- |
| | Strain | cp/mL | processed | ZIKV | genome | processed | ZIKV | genome | processed |
| | Type | [Cₜ]^{a} | reads | reads | coverage | reads | reads | coverage | reads |
| (−) | | 0 | | | | 1,153,388 | 0 | 0 | 73,343 |
| ctrl | | | | | | | | | |
| | | [no Cₜ] | | | | | | | |
| ZIKV | Uganda | 666 | 4,923,745 | 89 | 40.2 | 5,863,273 | 485 | 91.8 | 533,673 |
| | MR766 | [40.41] | | | | | | | |
| ZIKV | mex30 | 2,020 | 1714359 | 100 | 25 | 2,343,140 | 535 | 90.8 | 2,358,242 |
| | | [38.8] | | | | | | | |
| ZIKV | Uganda | 4,650 | — | — | — | 1,673,733 | 963 | 98 | 983,752 |
| | MR766 | [37.6] | | | | | | | |
| ZIKV | mex28 | 2,670 | — | — | — | 2,673,215 | 272 | 46 | 882,771 |
| | | [38.4] | | | | | | | |
| ZIKV | mex32 | 28,200 | — | — | — | 1,924,157 | 2,541 | 100 | 5,293,168 |
| | | [35] | | | | | | | |
| ZIKV | mex | 2,490 | — | — | — | 1,714,075 | 272 | 72.7 | 1,315 |
| | 32-dil^{e} | [38.5] | | | | | | | |
| ZIKV | mex33 | 3,340 | — | — | — | 1,829,861 | 117 | 12.9 | 1,722 |
| | | [38] | | | | | | | |
| ZIKV | mex39 | 11,500 | — | — | — | 3,697,437 | 1,460 | 98.7 | 6,921,547 |
| | | [36.3] | | | | | | | |
| ZIKV | mex39- | 310 | — | — | — | 4,242,025 | 32 | 7.4 | 109,626 |
| | dil^{f} | [41] | | | | | | | |
| ZIKV | mex34 | 4,650 | — | — | — | 1,407,161 | 131 | 63.6 | 477,502 |
| | | [37.6] | | | | | | | |
| ZIKV | mex47 | 7,560 | — | — | — | 1,089,334 | 427 | 57 | 1,597,467 |
| | | [36.9] | | | | | | | |

| | | Capture Probe^{b} | | Multiplex PCR^{b} | | | |
|---|---|---|---|---|---|---|---|
| | | # of | % of | PCR | #of pre- | # of | % of |
| | Strain | ZIKV | genome | band | processed | ZIKV | genome |
| | Type | reads | coverage | on gel | reads | reads | coverage |
| (−) | | 722 | | | 1,549,271 | 77 | — |
| ctrl | | | | | | | |
| ZIKV | Uganda | 270,083 | 72.6 | (−)^{d} | — | — | — |
| | MR766 | | | | | | |
| ZIKV | mex30 | 2,015,985 | 46.8 | (+) | 2,001,198 | 1,140,475 | 83.9 |
| ZIKV | Uganda | 914,949 | 98.3 | (−)^{d} | — | — | — |
| | MR766 | | | | | | |
| ZIKV | mex28 | 763,649 | 69.9 | (−)^{d} | — | — | — |
| ZIKV | mex32 | 4,955,790 | 99 | (+) | 1,000,076 | 801,609 | 96 |
| ZIKV | mex | 141* | | (−)^{d} | — | — | — |
| | 32-dil^{e} | | | | | | |
| ZIKV | mex33 | 1,194* | | (−)^{d} | — | — | — |
| ZIKV | mex39 | 6,661,543 | 99 | (+) | 1,311,004 | 1,103,019 | 96 |
| ZIKV | mex39- | 0 | 0 | (−)^{d} | — | — | — |
| | dil^{f} | | | | | | |
| ZIKV | mex34 | 354,333 | 52.9 | (+) | 1,726,298 | 604,848 | 95.4 |
| ZIKV | mex47 | 1,395,096 | 55.4 | (+) | 3,556,785 | 971,494 | 92.2 |

^{a}ZIKV titer estimated using quantitative RT-PCR with standard curve analysis;
^{b}random hexamer primers were used for reverse transcription of RNA to cDNA prior to capture probe enrichment or tiling multiplex PCR;
^{c} plasma matrix from deidentified blood donors;
^{d}duplicate experimental replicates performed, both without a visible PCR band by gel electrophoresis;
^{e}20-fold dilution of mex32;
^{f}100-fold dilution of mex39;
Abbreviations:
Ct, cycle threshold by ZIKV quantitative RT-PCR;
RH, random hexamer;
*ZIKV reads due to cross-contamination (genome coverage depth <10 cutoff value),
— not applicable

[0229] Next, the performance of MSSPE was evaluated followed by subsequent tiling multiplex PCR or capture probe enrichment on low-titer contrived and clinical ZIKV samples (666-3,340 copies/mL). The use of spiked primers further increased the number of ZIKV reads by 3×-5× and corresponding genome coverage by 25%-80% (average 58.5±21.5%), as compared to RH primers alone (FIG. 12E). MSSPE was important for ZIKV genome recovery in the two samples tested by tiling multiplex PCR, as multiplex PCR with the standard RH priming failed to yield a distinct band on gel electrophoresis, likely due to low abundance of virus in the samples.

[0230] All patents, patent applications, and publications mentioned herein are incorporated herein by reference in their entireties for all purposes.

The application's sequence listing, which the Patent Office published only in electronic form, follows.

SEQUENCE LISTING (7324 sequences)

SEQ ID NO: 1 - DNA, 13 bp, Artificial Sequence
  Description of Artificial Sequence: Synthetic primer
cagcagaagtccg

SEQ ID NO: 2 - DNA, 13 bp, Artificial Sequence
  Description of Artificial Sequence: Synthetic primer
ctgccatagctgt

SEQ ID NO: 3 - DNA, 13 bp, Artificial Sequence
  Description of Artificial Sequence: Synthetic primer
ttgtgatggcagg

SEQ ID NO: 4 - DNA, 13 bp, Artificial Sequence
  Description of Artificial Sequence: Synthetic primer
gtatgccggggca

SEQ ID NO: 5 - DNA, 13 bp, Artificial Sequence
  Description of Artificial Sequence: Synthetic primer
caaggtaggcttc

SEQ ID NO: 6 - DNA, 13 bp, Artificial Sequence
  Description of Artificial Sequence: Synthetic primer
ttcgctctattct

SEQ ID NO: 7 - DNA, 13 bp, Artificial Sequence
  Description of Artificial Sequence: Synthetic primer
atgtgcgtccttg

SEQ ID NO: 8 - DNA, 13 bp, Artificial Sequence
  Description of Artificial Sequence: Synthetic primer
cgtactgtacctc

SEQ ID NO: 9 - DNA, 13 bp, Artificial Sequence
  Description of Artificial Sequence: Synthetic primer
ctcacagtggctt

SEQ ID NO: 10 - DNA, 13 bp, Artificial Sequence
  Description of Artificial Sequence: Synthetic primer
ggataagaagatc

SEQ ID NO: 11 - DNA, 13 bp, Artificial Sequence
  Description of Artificial Sequence: Synthetic primer
ggattgcgttgag

SEQ ID NO: 12 - DNA, 13 bp, Artificial Sequence
  Description of Artificial Sequence: Synthetic primer
accccgaacccat

SEQ ID NO: 13 - DNA, 13 bp, Artificial Sequence
  Description of Artificial Sequence: Synthetic primer
cttgggtatgatc

SEQ ID NO: 14 - DNA, 13 bp, Artificial Sequence
  Description of Artificial Sequence: Synthetic primer
agccatctttagc

SEQ ID NO: 15 - DNA, 13 bp, Artificial Sequence
  Description of Artificial Sequence: Synthetic primer
aaaattgcaagct

SEQ ID NO: 16 - DNA, 13 bp, Artificial Sequence
  Description of Artificial Sequence: Synthetic primer
aaccatcgctcgt

SEQ ID NO: 17 - DNA, 13 bp, Artificial Sequence
  Description of Artificial Sequence: Synthetic primer
tccgcttcccact

SEQ ID NO: 18 - DNA, 13 bp, Artificial Sequence
  Description of Artificial Sequence: Synthetic primer
aaatcaccactct

SEQ ID NO: 19 - DNA, 13 bp, Artificial Sequence
  Description of Artificial Sequence: Synthetic primer
tccaacttgtgtt

SEQ ID NO: 20 - DNA, 13 bp, Artificial Sequence
  Description of Artificial Sequence: Synthetic primer
catcctttgtctt

SEQ ID NO: 21 - DNA, 13 bp, Artificial Sequence
  Description of Artificial Sequence: Synthetic primer
actctcctggttt

SEQ ID NO: 22 - DNA, 13 bp, Artificial Sequence
  Description of Artificial Sequence: Synthetic primer
ggcctcatccata

SEQ ID NO: 23 - DNA, 13 bp, Artificial Sequence
  Description of Artificial Sequence: Synthetic primer
cattgccgttcct

SEQ ID NO: 24 - DNA, 13 bp, Artificial Sequence
  Description of Artificial Sequence: Synthetic primer
gcagcgctggcat

SEQ ID NO: 25 - DNA, 13 bp, Artificial Sequence
  Description of Artificial Sequence: Synthetic primer
tttcatgagttcc

SEQ ID NO: 26 - DNA, 13 bp, Artificial Sequence
  Description of Artificial Sequence: Synthetic primer
aagccgctcctct

SEQ ID NO: 27 - DNA, 13 bp, Artificial Sequence
  Description of Artificial Sequence: Synthetic primer
gtcaccattccaa

SEQ ID NO: 28 - DNA, 13 bp, Artificial Sequence
  Description of Artificial Sequence: Synthetic primer
tctccttcccatt

SEQ ID NO: 29 - DNA, 13 bp, Artificial Sequence
  Description of Artificial Sequence: Synthetic primer
ttgtgagtagcaa

SEQ ID NO: 30 - DNA, 13 bp, Artificial Sequence
  Description of Artificial Sequence: Synthetic primer
gcgacagtatggc

SEQ ID NO: 31 - DNA, 13 bp, Artificial Sequence
  Description of Artificial Sequence: Synthetic primer
atctggttcaagc

SEQ ID NO: 32 - DNA, 13 bp, Artificial Sequence
  Description of Artificial Sequence: Synthetic primer
tcctttcacttct

SEQ ID NO: 33 - DNA, 13 bp, Artificial Sequence
  Description of Artificial Sequence: Synthetic primer
ggcacaacacctt

SEQ ID NO: 34 - DNA, 13 bp, Artificial Sequence
  Description of Artificial Sequence: Synthetic primer
cagcttaccacag

SEQ ID NO: 35 - DNA, 13 bp, Artificial Sequence
  Description of Artificial Sequence: Synthetic primer
ctgaccatacggt

SEQ ID NO: 36 - DNA, 13 bp, Artificial Sequence
  Description of Artificial Sequence: Synthetic primer
ctagagcccagaa

SEQ ID NO: 37 - DNA, 13 bp, Artificial Sequence
  Description of Artificial Sequence: Synthetic primer
acatatccgagtc

SEQ ID NO: 38 - DNA, 13 bp, Artificial Sequence
  Description of Artificial Sequence: Synthetic primer
ccccctttggtct

SEQ ID NO: 39 - DNA, 13 bp, Artificial Sequence
  Description of Artificial Sequence: Synthetic primer
tatcattcaagaa

SEQ ID NO: 40 - DNA, 13 bp, Artificial Sequence
  Description of Artificial Sequence: Synthetic primer
aaataaaggagct

SEQ ID NO: 41 - DNA, 13 bp, Artificial Sequence
  Description of Artificial Sequence: Synthetic primer
gagagatccacac

SEQ ID NO: 42 - DNA, 13 bp, Artificial Sequence
  Description of Artificial Sequence: Synthetic primer
ttggtttcccagc

SEQ ID NO: 43 - DNA, 13 bp, Artificial Sequence
  Description of Artificial Sequence: Synthetic primer
tggtctttcccag

SEQ ID NO: 44 - DNA, 13 bp, Artificial Sequence
  Description of Artificial Sequence: Synthetic primer
ggatttccccaca

SEQ ID NO: 45 - DNA, 13 bp, Artificial Sequence
  Description of Artificial Sequence: Synthetic primer
tcacagctagtct

SEQ ID NO: 46 - DNA, 13 bp, Artificial Sequence
  Description of Artificial Sequence: Synthetic primer
ctgccatagctgt

SEQ ID NO: 47 - DNA, 13 bp, Artificial Sequence
  Description of Artificial Sequence: Synthetic primer
ttgtgatggcagg

SEQ ID NO: 48 - DNA, 13 bp, Artificial Sequence
  Description of Artificial Sequence: Synthetic primer
gtatgccggggca

SEQ ID NO: 49 - DNA, 13 bp, Artificial Sequence
  Description of Artificial Sequence: Synthetic primer
caaggtaggcttc

SEQ ID NO: 50 - DNA, 13 bp, Artificial Sequence
  Description of Artificial Sequence: Synthetic primer
ttcgctctattct

SEQ ID NO: 51 - DNA, 13 bp, Artificial Sequence
  Description of Artificial Sequence: Synthetic primer
atgtgcgtccttg

SEQ ID NO: 52 - DNA, 13 bp, Artificial Sequence
  Description of Artificial Sequence: Synthetic primer
cgtactgtacctc

SEQ ID NO: 53 - DNA, 13 bp, Artificial Sequence
  Description of Artificial Sequence: Synthetic primer
ctcacagtggctt

SEQ ID NO: 54 - DNA, 13 bp, Artificial Sequence
  Description of Artificial Sequence: Synthetic primer
ggataagaagatc

SEQ ID NO: 55 - DNA, 13 bp, Artificial Sequence
  Description of Artificial Sequence: Synthetic primer
ggattgcgttgag

SEQ ID NO: 56 - DNA, 13 bp, Artificial Sequence
  Description of Artificial Sequence: Synthetic primer
accccgaacccat

SEQ ID NO: 57 - DNA, 13 bp, Artificial Sequence
  Description of Artificial Sequence: Synthetic primer
cttgggtatgatc

SEQ ID NO: 58 - DNA, 13 bp, Artificial Sequence
  Description of Artificial Sequence: Synthetic primer
agccatctttagc

SEQ ID NO: 59 - DNA, 13 bp, Artificial Sequence
  Description of Artificial Sequence: Synthetic primer
aaaattgcaagct

SEQ ID NO: 60 - DNA, 13 bp, Artificial Sequence
  Description of Artificial Sequence: Synthetic primer
aaccatcgctcgt

SEQ ID NO: 61 - DNA, 13 bp, Artificial Sequence
  Description of Artificial Sequence: Synthetic primer
tccgcttcccact

SEQ ID NO: 62 - DNA, 13 bp, Artificial Sequence
  Description of Artificial Sequence: Synthetic primer
aaatcaccactct

SEQ ID NO: 63 - DNA, 13 bp, Artificial Sequence
  Description of Artificial Sequence: Synthetic primer
tccaacttgtgtt

SEQ ID NO: 64 - DNA, 13 bp, Artificial Sequence
  Description of Artificial Sequence: Synthetic primer
catcctttgtctt

SEQ ID NO: 65 - DNA, 13 bp, Artificial Sequence
  Description of Artificial Sequence: Synthetic primer
actctcctggttt

SEQ ID NO: 66 - DNA, 13 bp, Artificial Sequence
  Description of Artificial Sequence: Synthetic primer
ggcctcatccata

SEQ ID NO: 67 - DNA, 13 bp, Artificial Sequence
  Description of Artificial Sequence: Synthetic primer
cattgccgttcct

SEQ ID NO: 68 - DNA, 13 bp, Artificial Sequence
  Description of Artificial Sequence: Synthetic primer
gcagcgctggcat

SEQ ID NO: 69 - DNA, 13 bp, Artificial Sequence
  Description of Artificial Sequence: Synthetic primer
tttcatgagttcc

SEQ ID NO: 70 - DNA, 13 bp, Artificial Sequence
  Description of Artificial Sequence: Synthetic primer
aagccgctcctct

SEQ ID NO: 71 - DNA, 13 bp, Artificial Sequence
  Description of Artificial Sequence: Synthetic primer
gtcaccattccaa

SEQ ID NO: 72 - DNA, 13 bp, Artificial Sequence
  Description of Artificial Sequence: Synthetic primer
tctccttcccatt

SEQ ID NO: 73 - DNA, 13 bp, Artificial Sequence
  Description of Artificial Sequence: Synthetic primer
ttgtgagtagcaa

SEQ ID NO: 74 - DNA, 13 bp, Artificial Sequence
  Description of Artificial Sequence: Synthetic primer
gcgacagtatggc

SEQ ID NO: 75 - DNA, 13 bp, Artificial Sequence
  Description of Artificial Sequence: Synthetic primer
atctggttcaagc

SEQ ID NO: 76 - DNA, 13 bp, Artificial Sequence
  Description of Artificial Sequence: Synthetic primer
tcctttcacttct

SEQ ID NO: 77 - DNA, 13 bp, Artificial Sequence
  Description of Artificial Sequence: Synthetic primer
ggcacaacacctt

SEQ ID NO: 78 - DNA, 13 bp, Artificial Sequence
  Description of Artificial Sequence: Synthetic primer
cagcttaccacag

SEQ ID NO: 79 - DNA, 13 bp, Artificial Sequence
  Description of Artificial Sequence: Synthetic primer
ctgaccatacggt

SEQ ID NO: 80 - DNA, 13 bp, Artificial Sequence
  Description of Artificial Sequence: Synthetic primer
ctagagcccagaa

SEQ ID NO: 81 - DNA, 13 bp, Artificial Sequence
  Description of Artificial Sequence: Synthetic primer
acatatccgagtc

SEQ ID NO: 82 - DNA, 13 bp, Artificial Sequence
  Description of Artificial Sequence: Synthetic primer
ccccctttggtct

SEQ ID NO: 83 - DNA, 13 bp, Artificial Sequence
  Description of Artificial Sequence: Synthetic primer
tatcattcaagaa

SEQ ID NO: 84 - DNA, 13 bp, Artificial Sequence
  Description of Artificial Sequence: Synthetic primer
aaataaaggagct

SEQ ID NO: 85 - DNA, 13 bp, Artificial Sequence
  Description of Artificial Sequence: Synthetic primer
gagagatccacac

SEQ ID NO: 86 - DNA, 13 bp, Artificial Sequence
  Description of Artificial Sequence: Synthetic primer
ttggtttcccagc

SEQ ID NO: 87 - DNA, 13 bp, Artificial Sequence
  Description of Artificial Sequence: Synthetic primer
tggtctttcccag

SEQ ID NO: 88 - DNA, 13 bp, Artificial Sequence
  Description of Artificial Sequence: Synthetic primer
ggatttccccaca

SEQ ID NO: 89 - DNA, 13 bp, Artificial Sequence
  Description of Artificial Sequence: Synthetic primer
tcacagctagtct

SEQ ID NO: 90 - DNA, 13 bp, Artificial Sequence
  Description of Artificial Sequence: Synthetic primer
atgctgttttgcg

SEQ ID NO: 91 - DNA, 13 bp, Artificial Sequence
  Description of Artificial Sequence: Synthetic primer
ggcggccagcgtg

SEQ ID NO: 92 - DNA, 13 bp, Artificial Sequence
  Description of Artificial Sequence: Synthetic primer
gcgatctgtgcct

SEQ ID NO: 93 - DNA, 13 bp, Artificial Sequence
  Description of Artificial Sequence: Synthetic primer
ccgccgaagttcg

SEQ ID NO: 94 - DNA, 13 bp, Artificial Sequence
  Description of Artificial Sequence: Synthetic primer
agaaaccatggat

SEQ ID NO: 95 - DNA, 13 bp, Artificial Sequence
  Description of Artificial Sequence: Synthetic primer
agaaaccatggat

SEQ ID NO: 96 - DNA, 13 bp, Artificial Sequence
  Description of Artificial Sequence: Synthetic primer
ccgccgaagttcg

SEQ ID NO: 97 - DNA, 18 bp, Artificial Sequence
  Description of Artificial Sequence: Synthetic oligonucleotide
gtttcccactggaggata

SEQ ID NO: 98 - DNA, 120 bp, Artificial Sequence
  Description of Artificial Sequence: Synthetic probe
gcaaagggagcttggtgacatgtgccaagtttacgtgttctaagaagatgaccgggaagagcattcaaccggaaaatctggagtatcggataatgctatcagtgcatggctcccagcata

SEQ ID NO: 99 - DNA, 120 bp, Artificial Sequence
  Description of Artificial Sequence: Synthetic probe
gttgttgatctgtgtgaatcagactgcgacagttcgagtttgaagcgaaagctagcaacagtatcaacaggttttattttggatttggaaacgagagtttctggtcatgaaaaacccaaa

SEQ ID NO: 100 - DNA, 120 bp, Artificial Sequence
  Description of Artificial Sequence: Synthetic probe
aaaacccaaaaaagaaatccggaggattccggattgtcaatatgctaaaacgcggagtagcccgtgtgagcccctttgggggcttgaagaggctgccagccggacttctgctgggtcatg

SEQ ID NO: 101 - DNA, 120 bp, Artificial Sequence
  Description of Artificial Sequence: Synthetic probe
ctgggtcatgggcccatcaggatggtcttggcgattctagcctttttgagattcacggcaatcaagccatcactgggtctcatcaatagatggggttcagtggggaaaaaagaggctatg

SEQ ID NO: 102 - DNA, 120 bp, Artificial Sequence
  Description of Artificial Sequence: Synthetic probe
agaggctatggaaacaataaagaagttcaagaaagatctggctgccatgctgagaataatcaatgctaggaaggagaagaagagacgaggcgcagatactagtgtcggaattgttggcct

SEQ ID NO: 103 - DNA, 120 bp, Artificial Sequence
  Description of Artificial Sequence: Synthetic probe
ttgttggcctcctgctgaccacagctatggcagcggaggtcactagacgtgggagtgcatactatatgtacttggacagaaacgatgctggggaggccatatcttttccaaccacattgg

SEQ ID NO: 104 - DNA, 120 bp, Artificial Sequence
  Description of Artificial Sequence: Synthetic probe
accacattggggatgaataagtgttatatacagatcatggatcttggacacatgtgtgatgccaccatgagctatgaatgccctatgctggatgagggggtggaaccagatgacgtcgat

SEQ ID NO: 105 - DNA, 120 bp, Artificial Sequence
  Description of Artificial Sequence: Synthetic probe
tgacgtcgattgttggtgcaacacgacgtcaacttgggttgtgtacggaacctgccatcacaaaaaaggtgaagcacggagatctagaagagctgtgacgctcccctcccattccaccag

SEQ ID NO: 106 - DNA, 120 bp, Artificial Sequence
  Description of Artificial Sequence: Synthetic probe
attccaccaggaagctgcaaacgcggtcgcaaacctggttggaatcaagagaatacacaaagcacttgattagagtcgaaaattggatattcaggaaccctggcttcgcgttagcagcag

SEQ ID NO: 107 - DNA, 120 bp, Artificial Sequence
  Description of Artificial Sequence: Synthetic probe
ttagcagcagctgccatcgcttggcttttgggaagctcaacgagccaaaaagtcatatacttggtcatgatactgctgattgccccggcatacagcatcaggtgcataggagtcagcaat

SEQ ID NO: 108 - DNA, 120 bp, Artificial Sequence
  Description of Artificial Sequence: Synthetic probe
agtcagcaatagggactttgtggaaggtatgtcaggtgggacttgggttgatgttgtcttggaacatggaggttgtgtcaccgtaatggcacaggacaaaccgactgtcgacatagagct

SEQ ID NO: 109 - DNA, 120 bp, Artificial Sequence
  Description of Artificial Sequence: Synthetic probe
acatagagctggttacaacaacagtcagcaacatggcggaggtaagatcctactgctatgaggcatcaatatcagacatggcttctgacagccgctgcccaacacaaggtgaagcctacc

SEQ ID NO: 110 - DNA, 120 bp, Artificial Sequence
  Description of Artificial Sequence: Synthetic probe
gaagcctaccttgacaagcaatcagacactcaatatgtctgcaaaagaacgttagtggacagaggctggggaaatggatgtggactttttggcaaagggagcctggtgacatgcgctaag

SEQ ID NO: 111 - DNA, 120 bp, Artificial Sequence
  Description of Artificial Sequence: Synthetic probe
atgcgctaagtttgcatgctccaagaaaatgaccgggaagagcatccagccagagaatctggagtaccggataatgctgtcagttcatggctcccagcacagtgggatgatcgttaatga

SEQ ID NO: 112 - DNA, 120 bp, Artificial Sequence
  Description of Artificial Sequence: Synthetic probe
tcgttaatgacacaggacatgaaactgatgagaatagagcgaaagttgagataacgcccaattcaccgagagccgaagccaccctggggggttttggaagcctaggacttgattgtgaac

SEQ ID NO: 113 - DNA, 120 bp, Artificial Sequence
  Description of Artificial Sequence: Synthetic probe
gattgtgaaccgaggacaggccttgacttttcagatttgtattacttgactatgaataacaagcactggttggttcacaaggagtggttccacgacattccattaccttggcacgctggg

SEQ ID NO: 114 - DNA, 120 bp, Artificial Sequence
  Description of Artificial Sequence: Synthetic probe
gcacgctggggcagacaccggaactccacactggaacaacaaagaagcactggtagagttcaaggacgcacatgccaaaaggcaaactgtcgtggttctagggagtcaagaaggagcagt

SEQ ID NO: 115 - DNA, 120 bp, Artificial Sequence
  Description of Artificial Sequence: Synthetic probe
aaggagcagttcacacggcccttgctggagctctggaggctgagatggatggtgcaaagggaaggctgtcctctggccacttgaaatgtcgcctgaaaatggataaacttagattgaagg

SEQ ID NO: 116 - DNA, 120 bp, Artificial Sequence
  Description of Artificial Sequence: Synthetic probe
agattgaagggcgtgtcatactccttgtgtactgcagcgttcacattcaccaagatcccggctgaaacactgcacgggacagtcacagtggaggtacagtacgcagggacagatggacct

SEQ ID NO: 117 - DNA, 120 bp, Artificial Sequence
  Description of Artificial Sequence: Synthetic probe
agatggaccttgcaaggttccagctcagatggcggtggacatgcaaactctgaccccagttgggaggttgataaccgctaaccccgtaatcactgaaagcactgagaactctaagatgat

SEQ ID NO: 118 - DNA, 120 bp, Artificial Sequence
  Description of Artificial Sequence: Synthetic probe
ctaagatgatgctggaacttgatccaccatttggggactcttacattgtcataggagtcggggagaagaagatcacccaccactggcacaggagtggcagcaccattggaaaagcatttg

SEQ ID NO: 119 - DNA, 120 bp, Artificial Sequence
  Description of Artificial Sequence: Synthetic probe
aaagcatttgaagccactgtgagaggtgccaagagaatggcagtcttgggagacacagcctgggactttggatcagttggaggcgctctcaactcattgggcaagggcatccatcaaatt

SEQ ID NO: 120 - DNA, 120 bp, Artificial Sequence
  Description of Artificial Sequence: Synthetic probe
ccatcaaatttttggagcagctttcaaatcattgtttggaggaatgtcctggttctcacaaattctcattggaacgttgctgatgtggttgggtctgaacacaaagaatggatctatttc

SEQ ID NO: 121 - DNA, 120 bp, Artificial Sequence
  Description of Artificial Sequence: Synthetic probe
gatctatttcccttatgtgcttggccttagggggagtgttgatcttcttatccacagccgtctctgctgatgtggggtgctcggtggacttctcaaagaaggagacgagatgcggtacag

SEQ ID NO: 122 - DNA, 120 bp, Artificial Sequence
  Description of Artificial Sequence: Synthetic probe
tgcggtacaggggtgttcgtctataacgacgttgaagcctggagggacaggtacaagtaccatcctgactccccccgtagattggcagcagcagtcaagcaagcctgggaagatggtatc

SEQ ID NO: 123 - DNA, 120 bp, Artificial Sequence
  Description of Artificial Sequence: Synthetic probe
agatggtatctgcgggatctcctctgtttcaagaatggaaaacatcatgtggagatcagtagaaggggagctcaacgcaatcctggaagagaatggagttcaactgacggtcgttgtggg

SEQ ID NO: 124 - DNA, 120 bp, Artificial Sequence
  Description of Artificial Sequence: Synthetic probe
tcgttgtgggatctgtaaaaaaccccatgtggagaggtccacagagattgcccgtgcctgtgaacgagctgccccacggctggaaggcttgggggaaatcgtatttcgtcagagcagcaa

SEQ ID NO: 125 - DNA, 120 bp, Artificial Sequence
  Description of Artificial Sequence: Synthetic probe
agagcagcaaagacaaataacagctttgtcgtggatggtgacacactgaaggaatgcccactcaaacatagagcatggaacagctttcttgtggaggatcatgggttcggggtatttcac

SEQ ID NO: 126 - DNA, 120 bp, Artificial Sequence
  Description of Artificial Sequence: Synthetic probe
ggtatttcacactagtgtctggctcaaggttagagaagattattcattagagtgtgatccagccgttattggaacagctgttaagggaaaggaggctgtacacagtgatctaggctactg

SEQ ID NO: 127 - DNA, 120 bp, Artificial Sequence
  Description of Artificial Sequence: Synthetic probe
taggctactggattgagagtgagaagaatgacacatggaggctgaagagggcccatctgatcgagatgaaaacatgtgaatggccaaagtcccacacattgtggacagatggaatagaag

SEQ ID NO: 128 - DNA, 120 bp, Artificial Sequence
  Description of Artificial Sequence: Synthetic probe
ggaatagaagagagtgatctgatcatacccaagtctttagctgggccactcagccatcacaataccagagagggctacaggacccaaatgaaagggccatggcacagtgaagagcttgaa

SEQ ID NO: 129 - DNA, 120 bp, Artificial Sequence
  Description of Artificial Sequence: Synthetic probe
agagcttgaaattcggtttgaggaatgcccaggcactaaggtccacgtggaggaaacatgtggaacaagaggaccatctctgagatcaaccactgcaagcggaagggtgatcgaggaatg

SEQ ID NO: 130 - DNA, 120 bp, Artificial Sequence
  Description of Artificial Sequence: Synthetic probe
tcgaggaatggtgctgcagggagtgcacaatgcccccactgtcgttccgggctaaagatggctgttggtatggaatggagataaggcccaggaaagaaccagaaagcaacttagtaaggt

SEQ ID NO: 131 - DNA, 120 bp, Artificial Sequence
  Description of Artificial Sequence: Synthetic probe
ttagtaaggtcaatggtgactgcaggatcaactgatcacatggaccacttctcccttggagtgcttgtgatcctgctcatggtgcaggaagggctgaagaagagaatgaccacaaagatc

SEQ ID NO: 132 - DNA, 120 bp, Artificial Sequence
  Description of Artificial Sequence: Synthetic probe
cacaaagatcatcataagcacatcaatggcagtgctggtagctatgatcctgggaggattttcaatgagtgacctggctaagcttgcaattttgatgggtgccaccttcgcggaaatgaa

SEQ ID NO: 133 - DNA, 120 bp, Artificial Sequence
  Description of Artificial Sequence: Synthetic probe
cggaaatgaacactggaggagatgtagctcatctggcgctgatagcggcattcaaagtcagaccagcgttgctggtatctttcatcttcagagctaattggacaccccgtgaaagcatgc

SEQ ID NO: 134 - DNA, 120 bp, Artificial Sequence
  Description of Artificial Sequence: Synthetic probe
gaaagcatgctgctggccttggcctcgtgtcttttgcaaactgcgatctccgccttggaaggcgacctgatggttctcatcaatggttttgctttggcctggttggcaatacgagcgatg

SEQ ID NO: 135 - DNA, 120 bp, Artificial Sequence
  Description of Artificial Sequence: Synthetic probe
acgagcgatggttgttccacgcactgataacatcaccttggcaatcctggctgctctgacaccactggcccggggcacactgcttgtggcgtggagagcaggccttgctacttgcggggg

SEQ ID NO: 136 - DNA, 120 bp, Artificial Sequence
  Description of Artificial Sequence: Synthetic probe
cttgcggggggtttatgctcctctctctgaagggaaaaggcagtgtgaagaagaacttaccatttgtcatggccctgggactaaccgctgtgaggctggtcgaccccatcaacgtggtgg

SEQ ID NO: 137 - DNA, 120 bp, Artificial Sequence
  Description of Artificial Sequence: Synthetic probe
aacgtggtgggactgctgttgctcacaaggagtgggaagcggagctggccccctagcgaagtactcacagctgttggcctgatatgcgcattggctggagggttcgccaaggcagatata

SEQ ID NO: 138 - DNA, 120 bp, Artificial Sequence
  Description of Artificial Sequence: Synthetic probe
ggcagatatagagatggctgggcccatggccgcggtcggtctgctaattgtcagttacgtggtctcaggaaagagtgtggacatgtacattgaaagagcaggtgacatcacatgggaaaa

SEQ ID NO: 139 - DNA, 120 bp, Artificial Sequence
  Description of Artificial Sequence: Synthetic probe
catgggaaaaagatgcggaagtcactggaaacagtccccggctcgatgtggcgctagatgagagtggtgatttctccctggtggaggatgacggtccccccatgagagagatcatactca

SEQ ID NO: 140 - DNA, 120 bp, Artificial Sequence
  Description of Artificial Sequence: Synthetic probe
atcatactcaaggtggtcctgatgaccatctgtggcatgaacccaatagccataccctttgcagctggagcgtggtacgtatacgtgaagactggaaaaaggagtggtgctctatgggat

SEQ ID NO: 141 - DNA, 120 bp, Artificial Sequence
  Description of Artificial Sequence: Synthetic probe
tctatgggatgtgcctgctcccaaggaagtaaaaaagggggagaccacagatggagtgtacagagtaatgactcgtagactgctaggttcaacacaagttggagtgggagttatgcaaga

SEQ ID NO: 142 - DNA, 120 bp, Artificial Sequence
  Description of Artificial Sequence: Synthetic probe
ttatgcaagagggggtctttcacactatgtggcacgtcacaaaaggatccgcgctgagaagcggtgaagggagacttgatccatactggggagatgtcaagcaggatctggtgtcatact

SEQ ID NO: 143 - DNA, 120 bp, Artificial Sequence
  Description of Artificial Sequence: Synthetic probe
gtgtcatactgtggtccatggaagctagatgccgcctgggatgggcacagcgaggtgcagctcttggccgtgccccccggagagagagcgaggaacatccagactctgcccggaatattt

SEQ ID NO: 144 - DNA, 120 bp, Artificial Sequence
  Description of Artificial Sequence: Synthetic probe
cggaatatttaagacaaaggatggggacattggagcggttgcgctggattacccagcaggaacttcaggatctccaatcctagacaagtgtgggagagtgataggactttatggcaatgg

SEQ ID NO: 145 - DNA, 120 bp, Artificial Sequence
  Description of Artificial Sequence: Synthetic probe
atggcaatggggtcgtgatcaaaaacgggagttatgttagtgccatcacccaagggaggagggaggaagagactcctgttgagtgcttcgagccctcgatgctgaagaagaagcagctaa

SEQ ID NO: 146 - DNA, 120 bp, Artificial Sequence
  Description of Artificial Sequence: Synthetic probe
aagcagctaactgtcttagacttgcatcctggagctgggaaaaccaggagagttcttcctgaaatagtccgtgaagccataaaaacaagactccgtactgtgatcttagctccaaccagg

SEQ ID NO: 147 - DNA, 120 bp, Artificial Sequence
  Description of Artificial Sequence: Synthetic probe
tccaaccagggttgtcgctgctgaaatggaggaggcccttagagggcttccagtgcgttatatgacaacagcagtcaatgtcacccactctggaacagaaatcgtcgacttaatgtgcca

SEQ ID NO: 148 - DNA, 120 bp, Artificial Sequence
  Description of Artificial Sequence: Synthetic probe
taatgtgccatgccaccttcacttcacgtctactacagccaatcagagtccccaactataatctgtatattatggatgaggcccacttcacagatccctcaagtatagcagcaagaggat

SEQ ID NO: 149 - DNA, 120 bp, Artificial Sequence
  Description of Artificial Sequence: Synthetic probe
gcaagaggatacatttcaacaagggttgagatgggcgaggcggctgccatcttcatgaccgccacgccaccaggaacccgtgacgcatttccggactccaactcaccaattatggacacc

SEQ ID NO: 150 - DNA, 120 bp, Artificial Sequence
  Description of Artificial Sequence: Synthetic probe
tatggacaccgaagtggaagtcccagagagagcctggagctcaggctttgattgggtgacggatcattctggaaaaacagtttggtttgttccaagcgtgaggaacggcaatgagatcgc

SEQ ID NO: 151 - DNA, 120 bp, Artificial Sequence
  Description of Artificial Sequence: Synthetic probe
atgagatcgcagcttgtctgacaaaggctggaaaacgggtcatacagctcagcagaaagacttttgagacagagttccagaaaacaaaacatcaagagtgggactttgtcgtgacaactg

SEQ ID NO: 152 - DNA, 120 bp, Artificial Sequence
  Description of Artificial Sequence: Synthetic probe
gtgacaactgacatttcagagatgggcgccaactttaaagctgaccgtgtcatagattccaggagatgcctaaagccggtcatacttgatggcgagagagtcattctggctggacccatg

SEQ ID NO: 153 - DNA, 120 bp, Artificial Sequence
  Description of Artificial Sequence: Synthetic probe
tggacccatgcctgtcacacatgccagcgctgcccagaggagggggcgcataggcaggaatcccaacaaacctggagatgagtatctgtatggaggtgggtgcgcagagactgacgaaga

SEQ ID NO: 154 - DNA, 120 bp, Artificial Sequence
  Description of Artificial Sequence: Synthetic probe
ctgacgaagaccatgcacactggcttgaagcaagaatgctccttgacaatatttacctccaagatggcctcatagcctcgctctatcgacctgaggccgacaaagtagcagccattgagg

SEQ ID NO: 155 - DNA, 120 bp, Artificial Sequence
  Description of Artificial Sequence: Synthetic probe
gccattgagggagagttcaagcttaggacggagcaaaggaagacctttgtggaactcatgaaaagaggagatcttcctgtttggctggcctatcaggttgcatctgccggaataacctac

SEQ ID NO: 156 - DNA, 120 bp, Artificial Sequence
  Description of Artificial Sequence: Synthetic probe
aataacctacacagatagaagatggtgctttgatggcacgaccaacaacaccataatggaagacagtgtgccggcagaggtgtggaccagacacggagagaaaagagtgctcaaaccgag

SEQ ID NO: 157 - DNA, 120 bp, Artificial Sequence
  Description of Artificial Sequence: Synthetic probe
tcaaaccgaggtggatggacgccagagtttgttcagatcatgcggccctgaagtcattcaaggagtttgccgctgggaaaagaggagcggcttttggagtgatggaagccctgggaacac

SEQ ID NO: 158 - DNA, 120 bp, Artificial Sequence
  Description of Artificial Sequence: Synthetic probe
ctgggaacactgccaggacacatgacagagagattccaggaagccattgacaacctcgctgtgctcatgcgggcagagactggaagcaggccttacaaagccgcggcggcccaattgccg

SEQ ID NO: 159 - DNA, 120 bp, Artificial Sequence
  Description of Artificial Sequence: Synthetic probe
ccaattgccggagaccctagagaccataatgcttttggggttgctgggaacagtctcgctgggaatcttcttcgtcttgatgaggaacaagggcatagggaagatgggctttggaatggt

SEQ ID NO: 160 - DNA, 120 bp, Artificial Sequence
  Description of Artificial Sequence: Synthetic probe
ttggaatggtgactcttggggccagcgcatggctcatgtggctctcggaaattgagccagccagaattgcatgtgtcctcattgttgtgttcctattgctggtggtgctcatacctgagc

SEQ ID NO: 161 - DNA, 120 bp, Artificial Sequence
  Description of Artificial Sequence: Synthetic probe
atacctgagccagaaaagcaaagatctccccaggacaaccaaatggcaatcatcatcatggtagcagtaggtcttctgggcttgattaccgccaatgaactcggatggttggagagaaca

SEQ ID NO: 162 - DNA, 120 bp, Artificial Sequence
  Description of Artificial Sequence: Synthetic probe
ggagagaacaaagagtgacctaagccatctaatgggaaggagagaggagggggcaaccataggattctcaatggacattgacctgcggccagcctcagcttgggccatctatgctgcctt

SEQ ID NO: 163 - DNA, 120 bp, Artificial Sequence
  Description of Artificial Sequence: Synthetic probe
atgctgccttgacaactttcattaccccagccgtccaacatgcagtgaccacctcatacaacaactactccttaatggcgatggccacgcaagctggagtgttgtttggcatgggcaaag

SEQ ID NO: 164 - DNA, 120 bp, Artificial Sequence
  Description of Artificial Sequence: Synthetic probe
atgggcaaagggatgccattctacgcatgggactttggagtcccgctgctaatgataggttgctactcacaattaacacccctgaccctaatagtggccatcattttgctcgtggcgcac

SEQ ID NO: 165 - DNA, 120 bp, Artificial Sequence
  Description of Artificial Sequence: Synthetic probe
cgtggcgcactacatgtacttgatcccagggctgcaggcagcagctgcgcgtgctgcccagaagagaacggcagctggcatcatgaagaaccctgttgtggatggaatagtggtgactga

SEQ ID NO: 166 - DNA, 120 bp, Artificial Sequence
  Description of Artificial Sequence: Synthetic probe
tggtgactgacattgacacaatgacaattgacccccaagtggagaaaaagatgggacaggtgctactcatagcagtagccgtctccagcgccatactgtcgcggaccgcctgggggtggg

SEQ ID NO: 167 - DNA, 120 bp, Artificial Sequence
  Description of Artificial Sequence: Synthetic probe
tgggggtggggggaggctggggctctgatcacagccgcaacttccactttgtgggaaggctctccgaacaagtactggaactcctctacagccacttcactgtgtaacatttttagggga

SEQ ID NO: 168 - DNA, 120 bp, Artificial Sequence
  Description of Artificial Sequence: Synthetic probe
ttttaggggaagttacttggctggagcttctctaatctacacagtaacaagaaacgctggcttggtcaagagacgtgggggtggaacaggagagaccctgggagagaaatggaaggcccg

SEQ ID NO: 169 - DNA, 120 bp, Artificial Sequence
  Description of Artificial Sequence: Synthetic probe
ggaaggcccgcttgaaccagatgtcggccctggagttctactcctacaaaaagtcaggcatcaccgaggtgtgcagagaagaggcccgccgcgccctcaaggacggtgtggcaacgggag

SEQ ID NO: 170 - DNA, 120 bp, Artificial Sequence
  Description of Artificial Sequence: Synthetic probe
gcaacgggaggccatgctgtgtcccgaggaagtgcaaagctgagatggttggtggagcggggatacctgcagccctatggaaaggtcattgatcttggatgtggcagagggggctggagt

SEQ ID NO: 171 - DNA, 120 bp, Artificial Sequence
  Description of Artificial Sequence: Synthetic probe
gggctggagttactacgtcgccaccatccgcaaagttcaagaagtgaaaggatacacaaaaggaggccctggtcatgaagaacccgtgttggtgcaaagctatgggtggaacatagtccg

SEQ ID NO: 172 - DNA, 120 bp, Artificial Sequence
  Description of Artificial Sequence: Synthetic probe
acatagtccgtcttaagagtggggtggacgtctttcatatggcggctgagccgtgtgacacgttgctgtgtgacataggtgagtcatcatctagtcctgaagtggaagaagcacggacgc

SEQ ID NO: 173 - DNA, 120 bp, Artificial Sequence
  Description of Artificial Sequence: Synthetic probe
gcacggacgctcagagtcctctccatggtgggggattggcttgaaaaaagaccaggagccttttgtataaaagtgttgtgcccatacaccagcactatgatggaaaccctggagcgactg

SEQ ID NO: 174 - DNA, 120 bp, Artificial Sequence
  Description of Artificial Sequence: Synthetic probe
ggagcgactgcagcgtaggtatgggggaggactggtcagagtgccactctcccgcaactctacacatgagatgtactgggtctctggagcgaaaagcaacaccataaaaagtgtgtccac

SEQ ID NO: 175 - DNA, 120 bp, Artificial Sequence
  Description of Artificial Sequence: Synthetic probe
gtgtgtccaccacgagccagctcctcttggggcgcatggacgggcctaggaggccagtgaaatatgaggaggatgtgaatctcggctctggcacgcgggctgtggtaagctgcgctgaag

SEQ ID NO: 176 - DNA, 120 bp, Artificial Sequence
  Description of Artificial Sequence: Synthetic probe
tgcgctgaagctcccaacatgaagatcattggtaaccgcattgaaaggatccgcagtgagcacgcggaaacgtggttctttgacgagaaccacccatataggacatgggcttaccatgga

SEQ ID NO: 177 - DNA, 120 bp, Artificial Sequence
  Description of Artificial Sequence: Synthetic probe
ttaccatggaagctatgaggcccccacacaagggtcagcgtcctctctaataaacggggttgtcaggctcctgtcaaaaccctgggatgtggtgactggagtcacaggaatagccatgac

SEQ ID NO: 178 - DNA, 120 bp, Artificial Sequence
  Description of Artificial Sequence: Synthetic probe
tagccatgaccgacaccacaccgtatggtcagcaaagagttttcaaggaaaaagtggacactagggtgccagacccccaagaaggcactcgtcaggttatgagcatggtctcttcctggt

SEQ ID NO: 179 - DNA, 120 bp, Artificial Sequence
  Description of Artificial Sequence: Synthetic probe
tcttcctggttgtggaaagagctaggcaaacacaaacggccacgagtctgcaccaaagaagagttcatcaacaaggttcgtagcaatgcagcattaggggcaatatttgaagaggaaaaa

SEQ ID NO: 180 - DNA, 120 bp, Artificial Sequence
  Description of Artificial Sequence: Synthetic probe
agaggaaaaagagtggaagactgcagtggaagctgtgaacgatccaaggttctgggctctagtggacaaggaaagagagcaccacctgagaggagagtgccagagctgtgtgtacaacat

SEQ ID NO: 181 - DNA, 120 bp, Artificial Sequence
  Description of Artificial Sequence: Synthetic probe
tgtacaacatgatgggaaaaagagaaaagaaacaaggggaatttggaaaggccaagggcagccgcgccatctggtatatgtggctaggggctagatttctagagttcgaagcccttggat

SEQ ID NO: 182 - DNA, 120 bp, Artificial Sequence
  Description of Artificial Sequence: Synthetic probe
gcccttggattcttgaacgaggatcactggatggggagagagaactcaggaggtggtgttgaagggctgggattacaaagactcggatatgtcctagaagagatgagtcgtataccagga

SEQ ID NO: 183 - DNA, 120 bp, Artificial Sequence
  Description of Artificial Sequence: Synthetic probe
tataccaggaggaaggatgtatgcagatgacactgctggctgggacacccgcattagcaggtttgatctggagaatgaagctctaatcaccaaccaaatggagaaagggcacagggcctt

SEQ ID NO: 184 - DNA, 120 bp, Artificial Sequence
  Description of Artificial Sequence: Synthetic probe
acagggccttggcattggccataatcaagtacacataccaaaacaaagtggtaaaggtccttagaccagctgaaaaagggaaaacagttatggacattatttcgagacaagaccaaaggg

SEQ ID NO: 185 - DNA, 120 bp, Artificial Sequence
  Description of Artificial Sequence: Synthetic probe
gaccaaagggggagcggacaagttgtcacttacgctcttaacacatttaccaacctagtggtgcaactcattcggaatatggaggctgaggaagttctagagatgcaagacttgtggctg

SEQ ID NO: 186 - DNA, 120 bp, Artificial Sequence
  Description of Artificial Sequence: Synthetic probe
cttgtggctgctgcggaggtcagagaaagtgaccaactggttgcagagcaacggatgggataggctcaaacgaatggcagtcagtggagatgattgcgttgtgaagccaattgatgatag

SEQ ID NO: 187 - DNA, 120 bp, Artificial Sequence
  Description of Artificial Sequence: Synthetic probe
ttgatgataggtttgcacatgccctcaggttcttgaatgatatgggaaaagttaggaaggacacacaagagtggaaaccctcaactggatgggacaactgggaagaagttccgttttgct

SEQ ID NO: 188 - DNA, 120 bp, Artificial Sequence
  Description of Artificial Sequence: Synthetic probe
ccgttttgctcccaccacttcaacaagctccatctcaaggacgggaggtccattgtggttccctgccgccaccaagatgaactgattggccgggcccgcgtctctccaggggcgggatgg

SEQ ID NO: 189 - DNA, 120 bp, Artificial Sequence
  Description of Artificial Sequence: Synthetic probe
ggcgggatggagcatccgggagactgcttgcctagcaaaatcatatgcgcaaatgtggcagctcctttatttccacagaagggacctccgactgatggccaatgccatttgttcatctgt

SEQ ID NO: 190 - DNA, 120 bp, Artificial Sequence
  Description of Artificial Sequence: Synthetic probe
gttcatctgtgccagttgactgggttccaactgggagaactacctggtcaatccatggaaagggagaatggatgaccactgaagacatgcttgtggtgtggaacagagtgtggattgagg

SEQ ID NO: 191 - DNA, 120 bp, Artificial Sequence
  Description of Artificial Sequence: Synthetic probe
tggattgaggagaacgaccacatggaagacaagaccccagttacgaaatggacagacattccctatttgggaaaaagggaagacttgtggtgtggatctctcatagggcacagaccgcgc

SEQ ID NO: 192 - DNA, 120 bp, Artificial Sequence
  Description of Artificial Sequence: Synthetic probe
cagaccgcgcaccacctgggctgagaacattaaaaacacagtcaacatggtgcgcaggatcataggtgatgaagaaaagtacatggactacctatccacccaagttcgctacttgggtga

SEQ ID NO: 193 - DNA, 120 bp, Artificial Sequence
  Description of Artificial Sequence: Synthetic probe
acttgggtgaagaagggtctacacctggagtgctgtaagcaccaatcttaatgttgtcaggcctgctagtcagccacagcttggggaaagctgtgcagcctgtgacccccccaggagaag

SEQ ID NO: 194 - DNA, 120 bp, Artificial Sequence
  Description of Artificial Sequence: Synthetic probe
ccaggagaagctgggaaaccaagcctatagtcaggccgagaacgccatggcacggaagaagccatgctgcctgtgagcccctcagaggacactgagtcaaaaaaccccacgcgcttggag

SEQ ID NO: 195 - DNA, 115 bp, Artificial Sequence
  Description of Artificial Sequence: Synthetic probe
gcgcttggaggcgcaggatgggaaaagaaggtggcgaccttccccacccttcaatctggggcctgaactggagatcagctgtggatctccagaagagggactagtggttagagga

SEQ ID NO: 196 - DNA, 120 bp, Artificial Sequence
  Description of Artificial Sequence: Synthetic probe
acacaggttggagtgggagtcatgcaagagggagtcttccacaccatgtggcacgttacaaaaggagccgcactgaggagcggtgagggaagacttgatccatactggggggatgtcaag

SEQ ID NO: 197 - DNA, 120 bp, Artificial Sequence
  Description of Artificial Sequence: Synthetic probe
ggatgtcaagcaggacttggtgtcatactgtgggccttggaagttggatgcagcttgggatggactcagcgaggtacagcttttggccgtacctcccggagagagggccagaaacattca

SEQ ID NO: 198 - DNA, 120 bp, Artificial Sequence
  Description of Artificial Sequence: Synthetic probe
gaaacattcagaccctgcctggaatattcaagacaaaggacggggacatcggagcagttgctctggactaccctgcagggacctcaggatctccgatcctagacaaatgtggaagagtga

SEQ ID NO: 199 - DNA, 120 bp, Artificial Sequence
  Description of Artificial Sequence: Synthetic probe
ggaagagtgataggactctatggcaatggggttgtgatcaagaatggaagctatgttagtgctataacccagggaaagagggaggaggagactccggttgaatgtttcgaaccctcgatg

SEQ ID NO: 200 - DNA, 120 bp, Artificial Sequence
  Description of Artificial Sequence: Synthetic probe
accctcgatgctgaagaagaagcagctaactgtcttggatctgcatccaggagccggaaaaaccaggagagttcttcctgaaatagtccgtgaagccataaaaaagagactccggacagt

SEQ ID NO: 201 - DNA, 120 bp, Artificial Sequence
  Description of Artificial Sequence: Synthetic probe
gtggatcccttatagggcacagaccccgcaccacttgggctgaaaacatcaaagacacagtcaacatggtgcgcaggatcataggtgatgaagaaaagtacatggactatctatccaccc

SEQ ID NO: 202 - DNA, 120 bp, Artificial Sequence
  Description of Artificial Sequence: Synthetic probe
ctatccacccaagtccgctacttgggtgaggaagggtccacacccggagtgttgtaagcaccaattttagtgttgtcaggcctgctagtcagccacagtttggggaaagctgtgcagcct

SEQ ID NO: 203 - DNA, 120 bp, Artificial Sequence
  Description of Artificial Sequence: Synthetic probe
tgtgcagcctgtaacccccccaggagaagctgggaaaccaagctcatagtcaggccgagaacgccatggcacggaagaagccatgctgcctgtgagcccctcagaggacactgagtcaaa

SEQ ID NO: 204 - DNA, 120 bp, Artificial Sequence
  Description of Artificial Sequence: Synthetic probe
ctgagtcaaaaaaccccacgcgcttggaagcgcaggatgggaaaagaaggtggcgaccttccccacccttcaatctggggcctgaactggagactagctgtgaatctccagcagagggac

SEQ ID NO: 205 - DNA, 120 bp, Artificial Sequence
  Description of Artificial Sequence: Synthetic probe
gcagagggactagtggttagaggagaccccccggaaaacgcaaaacagcatattgacgctgggaaagaccagagactccatgagtttccaccacgctggccgccaggcacagatcgccga

SEQ ID NO: 206 - DNA, 120 bp, Artificial Sequence
  Description of Artificial Sequence: Synthetic probe
cctaccacgggagctacgaagcccccacgcaagggtcagcatcttccctcgtgaatggggttgttagactcctgtcaaagccctgggatgtggtgactggagttacaggaatagctatga

SEQ ID NO: 207 - DNA, 120 bp, Artificial Sequence
  Description of Artificial Sequence: Synthetic probe
gtgtacaacatgatgggaaaaagagaaaagaagcaaggggaattcgggaaagcaaaaggcagtcgcgccatctggtacatgtggttgggagccagattcttggagtttgaagcccttgga

SEQ ID NO: 208 - DNA, 120 bp, Artificial Sequence
  Description of Artificial Sequence: Synthetic probe
actgcaagcggaagggtgatcgaggaatggtgctgcagggaatgcacaatgcccccattgtcgttccgggcaaaagatggctgttggtatggaatggagataaggcccaggaaggaacca

SEQ ID NO: 209 - DNA, 120 bp, Artificial Sequence
  Description of Artificial Sequence: Synthetic probe
gaaggaaccagagagtaacctagtaaggtcaatggtgactgcaggatcaactgatcacatggatcacttctcccttggagtgcttgtgattctgctcatggtgcaggaagggctgaagaa

SEQ ID NO: 210 - DNA, 120 bp, Artificial Sequence
  Description of Artificial Sequence: Synthetic probe
ggctgaagaagagaatgaccacaaagatcatcataagcacatcaatggcagtgttggtagctatgatcctgggaggattttcaatgagtgacttggctaagcttgcaattctgatgggtg

SEQ ID NO: 211 - DNA, 120 bp, Artificial Sequence
  Description of Artificial Sequence: Synthetic probe
ctgatgggtgccaccttcgcggaaatgaacactggaggagatgtagctcatctggcgctgatagcggcattcaaagtcagacccgcgttgctggtctctttcatcttcagagccaattgg

SEQ ID NO: 212 - DNA, 120 bp, Artificial Sequence
  Description of Artificial Sequence: Synthetic probe
  modified_base (63)..(63): a, c, t, g, unknown or other
agccaattggacaccccgtgagagcatgctgctggccttggcctcgtgccttctgcaaactgngatctccgccctggaaggcgacctgatggttctcatcaatggttttgctttggcctg

SEQ ID NO: 213 - DNA, 120 bp, Artificial Sequence
  Description of Artificial Sequence: Synthetic probe
cactgggggcaatatttgaagaggagaaagaatggaagactgcagtggaagctgtgaacgatccaaggttctgggccctagtggacaaggaaagagagcaccacttgagaggagagtgtc

SEQ ID NO: 214 - DNA, 120 bp, Artificial Sequence
  Description of Artificial Sequence: Synthetic probe
ggagagtgtcagagctgtgtgtacaacatgatgggaaaaagagaaaagaagcaaggggaatttggaaaggccaagggcagccgcgccatttggtacatgtggctaggggctagatttcta

SEQ ID NO: 215 - DNA, 120 bp, Artificial Sequence
  Description of Artificial Sequence: Synthetic probe
tagatttctagagtttgaagcccttggattcttgaacgaggatcactggatggggagagagaattcaggaggtggtgttgaagggctgggattacaaagacttggatatgttctagaaga

SEQ ID NO: 216 - DNA, 120 bp, Artificial Sequence
  Description of Artificial Sequence: Synthetic probe
ttctagaagaaatgagccgcacaccaggaggaaagatgtatgcagatgataccgctggctgggacacccgcatcagtaggtttgatctggagaatgaagctctgatcaccaaccaaatgg

SEQ ID NO: 217 - DNA, 120 bp, Artificial Sequence
  Description of Artificial Sequence: Synthetic probe
aaccaaatggagaaagggcacagggccttggcgttggccataatcaagtacacataccaaaacaaagtggtaaaggtccttagaccagctgaaagagggaagacagttatggacatcatc

SEQ ID NO: 218 - DNA, 120 bp, Artificial Sequence
  Description of Artificial Sequence: Synthetic probe
ctgatgggtgccactttcgcagaaatgaacactggaggagatgtggctcacttggcattggttgcggcatttaaagtcagaccagccttgttggtttcctttatcttcagagccaactgg

SEQ ID NO: 219 - DNA, 120 bp, Artificial Sequence
  Description of Artificial Sequence: Synthetic probe
ctttggcctggttggcaatacgagcaatggccgtgccacgcactgacaatatcgctctagcaactctggccgctttaacaccattggccagaggcacactgctcgtggcatggagagcgg

SEQ ID NO: 220 - DNA, 120 bp, Artificial Sequence
  Description of Artificial Sequence: Synthetic probe
tggagagcgggcctcgccacttgtggagggttcatgcttctttccctgaaagggaaaggtagtgtgaagaagaacctgccttttgtcatggccttggggttggccgctgtgaggatagtg

SEQ ID NO: 221 - DNA, 120 bp, Artificial Sequence
  Description of Artificial Sequence: Synthetic probe
gaggatagtggaccccatcaatgtggtaggactactgttactcacaaggagtggaaaacggagctggccccccagtgaagtgcttacagctgttggcctgatatgtgcactggccggagg

SEQ ID NO: 222 - skipped

SEQ ID NO: 223 - DNA, 120 bp, Artificial Sequence
  Description of Artificial Sequence: Synthetic probe
aaccagatggaagaagggcacagagctctggcgttggccgtgattaaatacacataccaaaacaaagtggtgaaggttctcagaccagctgaaggagggaaaacagtcatggacatcatc

SEQ ID NO: 224 - DNA, 120 bp, Artificial Sequence
  Description of Artificial Sequence: Synthetic probe
ggacatcatctcaagacaagaccagagagggagtggacaagttgttacttatgccctcaacacattcaccaacctggtggtgcagcttatccggaacatggaggctgaggaagtgctaga

SEQ ID NO: 225 - DNA, 120 bp, Artificial Sequence
  Description of Artificial Sequence: Synthetic probe
aagtgctagagatgcatgatctgtggttgttgaggaaaccagagaaagtgaccagatggttgcagagtaatggatgggacagactcaaacggatggcagttagtggagatgactgcgttg

SEQ ID NO: 226 - DNA, 120 bp, Artificial Sequence
  Description of Artificial Sequence: Synthetic probe
gactgcgttgtaaagccaattgatgataggtttgcacatgccctcaggttcttgaatgacatgggaaaggttaggaaagacacacaggaatggaagccctcgactggatggagcaattgg

SEQ ID NO: 227 - DNA, 120 bp, Artificial Sequence
  Description of Artificial Sequence: Synthetic probe
tggctggagggtttgccaaggcagacatagagatggctgggcccatggctgcagtaggcctgctaattgtcagctatgtggtctcgggaaagagtgtggacatgtacatcgaaagagcag

SEQ ID NO: 228 - DNA, 120 bp, Artificial Sequence
  Description of Artificial Sequence: Synthetic probe
gaaagagcaggtgacatcacatgggaaaaggatgcagaaataactggaaacagtcctaggcttgatgtggcattggatgagagtggtgacttctctttgctggaagacgacggacccccg

SEQ ID NO: 229 - DNA, 120 bp, Artificial Sequence
  Description of Artificial Sequence: Synthetic probe
cggacccccgatgaaggagatcatactcaaagtggttttgatggccgtgtgcggcgtgagtcccatagccataccctttgcagctggagcttggtatgtgtacatcaagactggcaaacg

SEQ ID NO: 230 - DNA, 120 bp, Artificial Sequence
  Description of Artificial Sequence: Synthetic probe
aggtgctggagacacatgatctgtggacactgaggaaaccagcaaaagtcacccgctggctgggtaacaatggatggcacaagctcaaacggatggcagttagtggagatgactgcgttg

SEQ ID NO: 231 - DNA, 120 bp, Artificial Sequence
  Description of Artificial Sequence: Synthetic probe
gagcaattgggaggaggtcccgttctgttctcaccacttcaacaagctgcacctcaaggacgggagatccattgtggtcccctgccgccaccaagatgaactgattggccgagcccgtgt

SEQ ID NO: 232 - DNA, 120 bp, Artificial Sequence
  Description of Artificial Sequence: Synthetic probe
gagcccgtgtctcaccaggggcaggatggagcatccgtgagactgcttgtctggagaagtcatacgcgcaaatgtggcctctcctctacttccatataagagatctcaggcttatggcgc

SEQ ID NO: 233 - DNA, 96 bp, Artificial Sequence
  Description of Artificial Sequence: Synthetic probe
cttatggcgcacgcaatctgctcatctgtgcctgtcgattgggtcccaacagggaaaacaacctgctcgattcacgggaaaggagagtggatgacc

SEQ ID NO: 234 - DNA, 120 bp, Artificial Sequence
  Description of Artificial Sequence: Synthetic probe
agatgtcaagcaggatctggtgtcatactgtggtccatggaagctagatgccgcctgggacgggcacagcgaggtgcagctcttggccgtgccccccggagagagagcgaggaacatcca

SEQ ID NO: 235 - DNA, 120 bp, Artificial Sequence
  Description of Artificial Sequence: Synthetic probe
ggaacatccagactctgcccggaatatttaagacaaaggatggggacattggagcggttgcgctggattacccagcaggaacttcaggatctccaatcctagacaagtgtgggagagtga

SEQ ID NO: 236 - DNA, 120 bp, Artificial Sequence
  Description of Artificial Sequence: Synthetic probe
gggagagtgataggactttatggcaatggggtcgtgatcaaaaatgggagttatgttagtgccatcacccaagggaggagggaagaagagactcctgttgagtgcttcgagccctcgatg

SEQ ID NO: 237 - DNA, 120 bp, Artificial Sequence
  Description of Artificial Sequence: Synthetic probe
tatggagagaagagagtgctcaaaccgagatggatggatgctagggtctgttcagaccatgcggccctgaagtcgttcaaagaattcgccgctggaaaaagaggagcggctttgggagta

SEQ ID NO: 238 - DNA, 120 bp, Artificial Sequence
  Description of Artificial Sequence: Synthetic probe
tttgggagtaatggaggccctgggaacactgccaggacacatgacagagaggtttcaggaagccattgacaacctcgccgtgctcatgcgagcagagactggaagcaggccttataaggc

SEQ ID NO: 239 - DNA, 120 bp, Artificial Sequence
  Description of Artificial Sequence: Synthetic probe
cttataaggcagcggcagcccaactgccggagaccctagagaccattatgctcttaggtttgctgggaacagtttcactggggatcttcttcgtcttgatgcggaataagggcatcggga

SEQ ID NO: 240 - DNA, 120 bp, Artificial Sequence
  Description of Artificial Sequence: Synthetic probe
ggcatcgggaagatgggctttggaatggtaacccttggggccagtgcatggctcatgtggctttcggaaattgaaccagccagaattgcatgtgtcctcattgttgtgtttttattactg

SEQ ID NO: 241 - DNA, 120 bp, Artificial Sequence
  Description of Artificial Sequence: Synthetic probe
tttattactggtggtgctcatacccgagccagagaagcaaagatctccccaagataaccagatggcaattatcatcatggtggcagtgggccttctaggtttgataactgcaaacgaact

SEQ ID NO: 242 - DNA, 120 bp, Artificial Sequence
  Description of Artificial Sequence: Synthetic probe
tccgcacggtgatcctggctccaaccagggttgtcgctgctgaaatggaggaagcccttagagggcttccagtgcgttacatgacaacagcagttaatgtcacccactctgggacagaaa

SEQ ID NO: 243 - DNA, 120 bp, Artificial Sequence
  Description of Artificial Sequence: Synthetic probe
gggacagaaatcgttgatttaatgtgccatgccaccttcacttcacgcctactacaacccattagagtccccaactacaatctttacattatggatgaggcccacttcacagatccctca

SEQ ID NO: 244 - DNA, 120 bp, Artificial Sequence
  Description of Artificial Sequence: Synthetic probe
agatccctcaagtatagcagcaagaggatacatatcaacaagggttgagatgggcgaggcggctgccatcttcatgaccgccacaccaccaggaacccgcgacgcatttccggactctaa

SEQ ID NO: 245 - DNA, 120 bp, Artificial Sequence
  Description of Artificial Sequence: Synthetic probe
gctgccagccggacttctgctgggtcatggacccattagaatggttttggcgatactagcctttttgagatttacagcaatcaagccatcactgggcctcatcaatagatggggttcagt

SEQ ID NO: 246 - DNA, 120 bp, Artificial Sequence
  Description of Artificial Sequence: Synthetic probe
ggggttcagtggggaaaaaagaggctatggagataataaagaagtttaagaaagatcttgctgccatgttgagaataatcaatgctaggaaggagaggaagagacgtggtgcagacacca

SEQ ID NO: 247 - DNA, 120 bp, Artificial Sequence
  Description of Artificial Sequence: Synthetic probe
ctgactctaactcaccaatcatggacacagaagtggaagtcccagagagagcctggagctcaggctttgattgggtgacagaccattctgggaaaacaatttggtttgttccaagtgtga

SEQ ID NO: 248 - DNA, 120 bp, Artificial Sequence
  Description of Artificial Sequence: Synthetic probe
ccaagtgtgagaaacggaaatgaaatcgcagcctgtctgacaaaggctggaaagcgggttatacagctcagcaggaagacttttgagacagagtttcagaagacaaaaaatcaagagtgg

SEQ ID NO: 249 - DNA, 120 bp, Artificial Sequence
  Description of Artificial Sequence: Synthetic probe
tcaagagtgggactttgtcataacaactgacatttcagagatgggtgccaatttcaaggctgaccgggtcatcgattccaggagatgcctaaagccagtcatacttgatggtgagagagt

SEQ ID NO: 250 - DNA, 120 bp, Artificial Sequence
  Description of Artificial Sequence: Synthetic probe
gcagacaccagcatcggaatcattggcctcctgctgactacagccatggcagcagagatcactagacgcgggagtgcatactacatgtacttggataggagcgatgccgggaaggccatt

SEQ ID NO: 251 - DNA, 120 bp, Artificial Sequence
  Description of Artificial Sequence: Synthetic probe
gaaggccatttcgtttgctaccacaatgggagtgaacaagtgccacgtacagatcatggacctcgggcacatgtgtgacgccaccatgagttatgagtgccctatgctggatgagggagt

SEQ ID NO: 252 - DNA, 120 bp, Artificial Sequence
  Description of Artificial Sequence: Synthetic probe
atgagggagtggaaccagatgatgtcgattgctggtgcaacacgacatcaacttgggttgtgtacggaacctgtcatcacaaaaaaggtgaggcacggccctcaagaagagctgtcacgc

SEQ ID NO: 253 - DNA, 120 bp, Artificial Sequence
  Description of Artificial Sequence: Synthetic probe
gtgagagagtcatcctggctgggcccatgcctgtcacgcatgccagtgctgctcagaggagaggacgtataggcaggaaccccaacaaacctggagatgagtacatgtatggaggtgggt

SEQ ID NO: 254 - DNA, 120 bp, Artificial Sequence
  Description of Artificial Sequence: Synthetic probe
ggaggtgggtgtgcagagactgatgaagaccatgcacactggcttgaagcaagaatgcttcttgacaacatttacctccaggatggcctcatagcctcgctctatcggcctgaggccgac

SEQ ID NO: 255 - DNA, 120 bp, Artificial Sequence
  Description of Artificial Sequence: Synthetic probe
tgaggccgacaaggtagccgccattgagggagagttcaagctgaggacagagcaaaggaagacctttgtggaactcatgaagagaggagaccttcccgtttggctggcctatcaagtagc

SEQ ID NO: 256 - DNA, 120 bp, Artificial Sequence
  Description of Artificial Sequence: Synthetic probe
caggaaccctggcttcgcgttagcagcagctgccatcgcttggcttttgggaagctcaacgagccaaaaagtcatatacttggtcatgatactgctgattgccccggcatacagcatcag

SEQ ID NO: 257 - DNA, 120 bp, Artificial Sequence
  Description of Artificial Sequence: Synthetic probe
acagcatcaggtgcataggagtcagcaatagggactttgtggaaggtatgtcaggtgggacttgggttgatgttgtcttggaacatggaggttgtgtcaccgtaatggcacaggacaaac

SEQ ID NO: 258 - DNA, 120 bp, Artificial Sequence
  Description of Artificial Sequence: Synthetic probe
caggacaaaccgactgtcgacatagagctggttacaacaacagtcagcaacatggcggaggtaagatcctactgctatgaggcatcaatatcagacatggcttcggacagccgctgccca

SEQ ID NO: 259 - DNA, 120 bp, Artificial Sequence
  Description of Artificial Sequence: Synthetic probe
ccgctgcccaacacaaggtgaagcctaccttgacaagcaatcagacactcaatatgtctgcaaaagaacgttagtggacagaggctggggaaatggatgtggactttttggcaaagggag

SEQ ID NO: 260 - DNA, 120 bp, Artificial Sequence
  Description of Artificial Sequence: Synthetic probe
gcaaagggagcctggtgacatgcgctaagtttgcatgctccaagaaaatgaccgggaagagcatccagccagagaatctggagtaccggataatgctgtcagttcatggctcccagcaca

SEQ ID NO: 261 - DNA, 120 bp, Artificial Sequence
  Description of Artificial Sequence: Synthetic probe
cacggagagaaaagagtgctcaaaccgaggtggatggacgccagagtttgttcagatcatgcggccctgaagtcattcaaggagtttgccgctgggaaaagaggagcggcttttggagtg

SEQ ID NO: 262 - DNA, 120 bp, Artificial Sequence
  Description of Artificial Sequence: Synthetic probe
cctattgctggtggtgctcatacctgagccagaaaagcaaagatctccccaggacaaccaaatggcaatcatcatcatggtagcagtaggtcttctgggcttgattaccgccaatgaact

SEQ ID NO: 263 - DNA, 120 bp, Artificial Sequence
  Description of Artificial Sequence: Synthetic probe
ggtgtcatattgtgggccttggaagctggacgcagcttgggacggagttagtgaggtgcagcttctggccgtaccccctggagagagagccagaaacattcagactctgcctggaatatt

SEQ ID NO: 264 - DNA, 120 bp, Artificial Sequence
  Description of Artificial Sequence: Synthetic probe
caggacaagccaacagttgacatagagttggtcacgacgacggttagtaacatggccgaggtaagatcctattgctacgaggcatcgatatcggacatggcttcggacagtcgttgccca

SEQ ID NO: 265 - DNA, 120 bp, Artificial Sequence; identical to SEQ ID NO: 98
  Description of Artificial Sequence: Synthetic probe

SEQ ID NO: 266 - DNA, 120 bp, Artificial Sequence
  Description of Artificial Sequence: Synthetic probe
cagattcttggagtttgaagcccttggattcttgaacgaggaccattggatgggaagagaaaactcaggaggtggagtcgaagggttaggattgcaaagacttggatacattctagaaga

SEQ ID NO: 267 - DNA, 120 bp, Artificial Sequence
  Description of Artificial Sequence: Synthetic probe
ttggggatggggggaggctggagctttgatcacagcagcaacttccaccctgtgggaaggctccccaaacaaatactggaactcctccacagccacctcactgtgcaacatcttcagagg

SEQ ID NO: 268 - DNA, 120 bp, Artificial Sequence
  Description of Artificial Sequence: Synthetic probe
tcttcagaggaagttacttggcaggagcttcccttatttacacagtgacaagaaatgccggcctggttaagagacgtggaggtggaacgggagaaactctgggagagaagtggaaagccc

SEQ ID NO: 269 - DNA, 120 bp, Artificial Sequence
  Description of Artificial Sequence: Synthetic probe
tggaaagcccgcctgaatcagatgtcggccttggagttctactcttacaaaaagtcaggcatcactgaagtatgtagagaggaggctcgccgcgccctcaaggatggagtggccacagga

SEQ ID NO: 270 - DNA, 120 bp, Artificial Sequence
  Description of Artificial Sequence: Synthetic probe
ggggctggagttattatgccgccaccatccgcaaagtgcaggaggtgagaggatacacaaagggaggtcccggtcatgaagagcccatgctggtgcaaagctatgggtggaacataattc

SEQ ID NO: 271 - DNA, 120 bp, Artificial Sequence
  Description of Artificial Sequence: Synthetic probe
actcattgggcaagggcatccatcaaatttttggagcagctttcaaatcattgtttggaggaatgtcctggttctcacaaatcctcataggaacgttgctggtgtggttgggtctgaaca

SEQ ID NO: 272 - DNA, 120 bp, Artificial Sequence
  Description of Artificial Sequence: Synthetic probe
ggtctgaacacaaagaatggatctatttcccttacgtgcttggccttagggggagtgttgatcttcctatctacagccgtctctgctgatgtggggtgttcggtggacttctcaaagaag

SEQ ID NO: 273 - DNA, 120 bp, Artificial Sequence
  Description of Artificial Sequence: Synthetic probe
ctcaaagaaggaaacgagatgcggtacgggggtgttcgtctataacgacgttgaagcctggagggacaggtacaagtaccatcctgactcccctcgtagattggcagcagcagtcaagca

SEQ ID NO: 274 - DNA, 120 bp, Artificial Sequence
  Description of Artificial Sequence: Synthetic probe
cagtcaagcaggcctgggaagatgggatctgtgggatctcctctgtttcaagaatggaaaacattatgtggagatcagtagaaggggagctcaacgcaattctggaagagaatggagttc

SEQ ID NO: 275 - DNA, 120 bp, Artificial Sequence
  Description of Artificial Sequence: Synthetic probe
aatggagttcaactgacggtcgttgtgggatctgtaaaaaaccccatgtggagaggtccgcagaggttgcctgtgcctgtgaatgagctgccccacggttggaaggcctgggggaaatcg

SEQ ID NO: 276 - DNA, 120 bp, Artificial Sequence
  Description of Artificial Sequence: Synthetic probe
cgccctcaaggacggagtggcaacaggaggccatgctgtgtcccgaggaagcgcaaagcttagatggttggtggagagaggatacctgcagccctatggaaaggtcattgatcttggatg

SEQ ID NO: 277 - DNA, 120 bp, Artificial Sequence
  Description of Artificial Sequence: Synthetic probe
atcttggatgtggcagagggggctggagttactacgccgccaccatccgcaaagttcaagaggtgaaaggatacacaaagggaggccctggtcatgaagaacccacgttggtgcaaagct

SEQ ID NO: 278 - DNA, 120 bp, Artificial Sequence
  Description of Artificial Sequence: Synthetic probe
gtgcaaagctatggatggaacatagtccgtcttaagagtggggtggacgtctttcacatggcggcggagtcgtgtgacactttgctgtgtgacataggtgagtcatcatctagtcctgaa

SEQ ID NO: 279 - DNA, 120 bp, Artificial Sequence
  Description of Artificial Sequence: Synthetic probe
tagtcctgaagtggaagaagcacggacgctcagagtactctccatggtgggggattggcttgaaaaaagaccaggggccttttgtataaaggtgttgtgcccatacaccagcaccatgat

SEQ ID NO: 280 - DNA, 120 bp, Artificial Sequence
  Description of Artificial Sequence: Synthetic probe
gcaccatgatggaaaccctagagcgactgcagcgtaggtatgggggaggactggtcagagtgccactctcccgcaactctacacatgagatgtactgggtctctggagcgaaaagcaaca

SEQ ID NO: 281 - DNA, 120 bp, Artificial Sequence
  Description of Artificial Sequence: Synthetic probe
gggtctatctccctcacatgcttagccctggggggagtgatgatcttcctctccacggctgtttctgctgacgtggggtgctcggtggacttctcaaaaaaagaaacgagatgtggcacg

SEQ ID NO: 282 - DNA, 120 bp, Artificial Sequence
  Description of Artificial Sequence: Synthetic probe
ctgttaagcaggcttgggaagaggggatttgtgggatctcctccgtttcgagaatggaaaacatcatgtggaaatcagtggaaggggagcttaatgcaatcctagaggagaatggagtcc

SEQ ID NO: 283 - DNA, 120 bp, Artificial Sequence
  Description of Artificial Sequence: Synthetic probe
ggggaaatcgtactttgtcagagcggcaaagaccaacaacagttttgttgtcgacggagacacactgaaggagtgtccgctcaaacatagagcatggaatagcttccttgtggaggatca

SEQ ID NO: 284 - DNA, 120 bp, Artificial Sequence
  Description of Artificial Sequence: Synthetic probe
tggaggatcacgggtttgggattttccacaccagtgtttggctgaaggtcagagaggactactcattagagtgtgacccagccgtcataggaacagctgtcaagggaaaggaagctgcac

SEQ ID NO: 285 - DNA, 120 bp, Artificial Sequence
  Description of Artificial Sequence: Synthetic probe
gaagctgcacacagtgatctatgctattggattgagagtgaaaagaatgacacatggaggctgaggagggcccacctgattgagatgaaaacatgtgaatggccaaagtctcacacattg

SEQ ID NO: 286 - DNA, 120 bp, Artificial Sequence
  Description of Artificial Sequence: Synthetic probe
aaaagtaacatcataaagagtgtgtccaccacaagtcagctcctcttgggacgcatggatgggcctaggaggccagtgaaatatgaggaggatgtgaacctcggctcaggcacacgagct

SEQ ID NO: 287 - DNA, 120 bp, Artificial Sequence
  Description of Artificial Sequence: Synthetic probe
cacacgagctgtggcaagctgcgctgaggctcccaacatgaagatcattggtaggcgcattgagagaatccgcaatgaacatgcagagacatggttctttgatgaaaaccacccatacag

SEQ ID NO: 288 - DNA, 120 bp, Artificial Sequence
  Description of Artificial Sequence: Synthetic probe
acccatacaggacatgggcctaccatgggagctacgaagcccccacgcaggggtcagcgtcatccctcgtgaatggggttgttagactcttgtcaaagccctgggatgtggtgactggag

SEQ ID NO: 289 - DNA, 120 bp, Artificial Sequence
  Description of Artificial Sequence: Synthetic probe
tggaggaccatgggtttggagttttccacactagtgtgtggctcaaagtcagggaggattactcattagagtgtgatccagccgtgattggaacagccatcaaagggaaggaagctgctc

SEQ ID NO: 290 - DNA, 120 bp, Artificial Sequence
  Description of Artificial Sequence: Synthetic probe
gaagctgctcacagtgatcttggttattggattgagagcgagaagaacgacacctggagactgaagagggctcacatgatcgagatgaagacgtgtgagtggccaagatctcacacccta

SEQ ID NO: 291 - DNA, 120 bp, Artificial Sequence
  Description of Artificial Sequence: Synthetic probe
tcacaccctatggacagatggagtagaaggagagtgattgatcatacccaagtccttagctggtccactcagtcaccacaacaccagagagggttacagaactcaagtgaaagggccatg

SEQ ID NO: 292 - DNA, 120 bp, Artificial Sequence
  Description of Artificial Sequence: Synthetic probe
aagggccatggcatagtgaagagctcgaaatccggtttgaggagtgcccaggaaccaaggttcacgtggaggagacatgcggaactagaggaccatctctgagatcaactactgcaagtg

SEQ ID NO: 293 - DNA, 120 bp, Artificial Sequence
  Description of Artificial Sequence: Synthetic probe
gtgactggagttacaggaatagctatgactgacaccacgccatacggccaacaaagagtcttcaaggaaaaagttgacactagggtgccagatccccaagaaggcactcgccaagtaatg

SEQ ID NO: 294 - DNA, 120 bp, Artificial Sequence
  Description of Artificial Sequence: Synthetic probe
ccaagtaatgaacatggtctcgtcttggctatggaaggagctgggaaaacgcaagcggccacgtgtctgcaccaaagaagagttcattaataaggtgcgcagcaatgcagcactgggagc

SEQ ID NO: 295 - DNA, 120 bp, Artificial Sequence
  Description of Artificial Sequence: Synthetic probe
ctttggcctggttggcaatacgagcgatggttgttccacgcactgataacatcaccttggcaatcctggctgctctgacaccactggcccggggcacactgcttgtggcgtggagagcag

SEQ ID NO: 296 - DNA, 120 bp, Artificial Sequence
  Description of Artificial Sequence: Synthetic probe
tggagagcaggccttgctacttgcggggggtttatgctcctctctctgaagggaaaaggcagtgtgaagaagaacttaccatttgtcatggccctgggactaaccgctgtgaggctggtc

SEQ ID NO: 297 - DNA, 120 bp, Artificial Sequence
  Description of Artificial Sequence: Synthetic probe
ggacattatttcgagacaagaccaaagggggagcggacaagttgtcacttacgctcttaacacatttaccaacctagtggtgcaactcattcggaatatggaggctgaggaagttctaga

SEQ ID NO: 298 - DNA, 120 bp, Artificial Sequence
  Description of Artificial Sequence: Synthetic probe
aagttctagagatgcaagacttgtggctgctgcggaggtcagagaaagtgaccaactggttgcagagcaacggatgggataggctcaaacgaatggcagtcagtggagatgattgcgttg

SEQ ID NO: 299 - DNA, 120 bp, Artificial Sequence
  Description of Artificial Sequence: Synthetic probe
ggagagtgtcacagctgtgtgtacaacatgatgggaaaaagagaaaagaagcaaggagagttcgggaaagcaaaaggtagccgcgccatctggtacatgtggttgggagccagattcttg

SEQ ID NO: 300 - DNA, 120 bp, Artificial Sequence
  Description of Artificial Sequence: Synthetic probe
tggagagaacaaaaaatgacatagctcatctgatgggaaagagagaagagggaacaaccgtgggattctcaatggacatcgatctgcgaccagcctccgcatgggctatttatgccgcat

SEQ ID NO: 301 - DNA, 120 bp, Artificial Sequence
  Description of Artificial Sequence: Synthetic probe
gtggtaactgacattgacacaatgacaattgacccccaagtggagaagaagatgggacaagtgctacttatagcagtggctgtctccagtgctgtgttgctgcggaccgcttggggatgg

SEQ ID NO: 302 - DNA, 120 bp, Artificial Sequence
  Description of Artificial Sequence: Synthetic probe
gtggttctagggagtcaagaaggagccgttcacacggctcttgctggagccctggaggctgagatggatggtgcaaagggaaggctgtcctctggccacttgaaatgtcgcttgaaaatg

SEQ ID NO: 303 - DNA, 120 bp, Artificial Sequence
  Description of Artificial Sequence: Synthetic probe
cttgaaaatggacaaacttagattgaagggcgtgtcatactccttatgtaccgcggcgttcacattcaccaagatcccggctgaaacgctgcatgggacagtcacagtggaggtacagta

SEQ ID NO: 304 - DNA, 120 bp, Artificial Sequence
  Description of Artificial Sequence: Synthetic probe
aggtacagtatgcagggacagatggaccctgcaaggttccagctcagatggcggtggatatgcaaactctgaccccagttgggaggttgataaccgctaaccctgtgatcactgaaagca

SEQ ID NO: 305 - DNA, 120 bp, Artificial Sequence
  Description of Artificial Sequence: Synthetic probe
  modified_base (106)..(106): a, c, t, g, unknown or other
actgaaagcactgagaattcaaagatgatgttggaacttgacccaccatttggggattcttacattgtcataggagttggggataagaagatcacccaccactggnacaggagtggcagc

SEQ ID NO: 306 - DNA, 120 bp, Artificial Sequence
  Description of Artificial Sequence: Synthetic probe
gagtggcagcaccatcggaaaagcatttgaagccactgtgagaggcgccaagagaatggcagtcttgggagacacagcctgggactttggatcagtcggaggtgctctcaactcattggg

SEQ ID NO: 307 - DNA, 120 bp, Artificial Sequence
  Description of Artificial Sequence: Synthetic probe
tcccagcacagtgggatgattgttaatgatgaaaacagagcgaaggtcgaggttacgcccaattcaccaagagcagaagcaaccctgggaggctttggaagcttaggacttgattgtgaa

SEQ ID NO: 308 - DNA, 120 bp, Artificial Sequence
  Description of Artificial Sequence: Synthetic probe
ggcatgctggggcagacactggaactccacattggaacaacaaggaggcattagtggaattcaaggacgcccacgccaagaggcaaaccgtcgtggttttggggagccaggaaggagccg

SEQ ID NO: 309 - DNA, 120 bp, Artificial Sequence
  Description of Artificial Sequence: Synthetic probe
tagtggccatcattctgctcgtggcgcactacatgtacttgatcccaggtctacaggcagcagcggcgcgcgctgcccagaagagaacggcagctggcatcatgaagaaccctgttgtgg

SEQ ID NO: 310 - DNA, 120 bp, Artificial Sequence
  Description of Artificial Sequence: Synthetic probe
cctgttgtggatggaatagtggtgactgacattgacacaatgacaattgacccccaagtggagaaaaagatgggacaagtgctactcatagcagtagccatctccagtgccgttctgctg

SEQ ID NO: 311 - DNA, 120 bp, Artificial Sequence
  Description of Artificial Sequence: Synthetic probe
cgttctgctgcgcaccgcctgggggtggggggaggctggggccctgatcacagccgcaacttccactttgtgggaaggctctccgaataaatactggaactcctccacagccacttcact

SEQ ID NO: 312 - DNA, 120 bp, Artificial Sequence
  Description of Artificial Sequence: Synthetic probe
ccacttcactgtgtaacatttttaggggaagttacttggctggagcttctcttatttacacagtaacaagaaacgctggcctggtcaagagacgtggaggtggaacgggagagaccctgg

SEQ ID NO: 313 - DNA, 120 bp, Artificial Sequence
  Description of Artificial Sequence: Synthetic probe
gagaccctgggggagaaatggaaggcccgcctgaaccagatgtcggccctggagttttactcctacaaaaagtcaggcatcaccgaagtgtgcagagaagaagcccgccgcgccctcaag

SEQ ID NO: 314 - DNA, 120 bp, Artificial Sequence
  Description of Artificial Sequence: Synthetic probe
ggtctgaacacaaagaatggatctatctccctcacatgcttagccctggggggagtgatgattttcctttccacggctgtttctgctgatgttgggtgctcggtggacttctcaaaaaag

SEQ ID NO: 315 - DNA, 120 bp, Artificial Sequence
  Description of Artificial Sequence: Synthetic probe
ggcttgaatacaaaaaatggatccatttcccttgcatgtctggcgcttggaggggcgatgatctttctctccacggccgtctcggcagacgtggggtgctcagttgacttcgctagaaaa

SEQ ID NO: 316 - DNA, 120 bp, Artificial Sequence
  Description of Artificial Sequence: Synthetic probe
cgctagaaaagagacaagatgtggcacaggagttttcgtctacaacgacgttgatgcctggagggacagatacaagtaccatccagactctccacgtagactggcggcggctgttaagca

SEQ ID NO: 317 - DNA, 120 bp, Artificial Sequence
  Description of Artificial Sequence: Synthetic probe
ctgttaagcaagcttgggaagatggaatctgcgggatttcctccgtctcaaggatggaaaacatcatgtggaagtcggtggagggagagctcaatgctatactcgaagagaacggagtgc

SEQ ID NO: 318 - DNA, 120 bp, Artificial Sequence
  Description of Artificial Sequence: Synthetic probe
aacggagtgcagctcacagttgttgtaggacctgtaaaaaatcctatgtggagagcaccacaacggctaccggtgcctgtgaatgagcttcctcatggatggaaagcctggggcaaatca

SEQ ID NO: 319 - DNA, 120 bp, Artificial Sequence
  Description of Artificial Sequence: Synthetic probe
gggcaaatcatacttcatcaaagcagcaaagaccaacaatagctttgtggtcgatggcgacaccttgaaagagtgtccactcaaacagagggcctggaacagcttccttgtggaggacca

SEQ ID NO: 320 - DNA, 120 bp, Artificial Sequence
  Description of Artificial Sequence: Synthetic probe
acctaggatgtggtaggggaggctggagctactatgcggcaaccatccgcaaagtccaagaggtcagaggatacaccaaaggaggacctggccatgaagagccaatgctagtgcagagct

SEQ ID NO: 321 - DNA, 120 bp, Artificial Sequence
  Description of Artificial Sequence: Synthetic probe
gtgcagagctatggttggaacatagtccgcctcaagagcggagtggacgtgttccacatggcagctgagccttgcgacaccctcctatgtgacattggagagtcatcatctagtccagag

SEQ ID NO: 322 - DNA, 120 bp, Artificial Sequence
  Description of Artificial Sequence: Synthetic probe
tagtccagaggtggaggaaactagaacactcagagtgctttccatggtgggggattggttggagaagagaccaggagccttttgcataaaagtcctgtgcccatacacgagcaccatgat

SEQ ID NO: 323 - DNA, 120 bp, Artificial Sequence
  Description of Artificial Sequence: Synthetic probe
acccatataggacatgggcttaccatggaagctatgaggcccccacacaagggtcagcgtcctctctaataaacggggttgtcaggctcctgtcaaaaccctgggatgtggtgactggag

SEQ ID NO: 324 - DNA, 120 bp, Artificial Sequence
  Description of Artificial Sequence: Synthetic probe
tcaggttatgagcatggtctcttcctggttgtggaaagagctaggcaaacacaaacggccacgagtctgtaccaaagaagagttcatcaacaaggttcgtagcaatgcagcattaggggc

SEQ ID NO: 325 - DNA, 120 bp, Artificial Sequence
  Description of Artificial Sequence: Synthetic probe
gccgtcacgctcccatctcactccacaaggaaattgcaaacgcggtcgcagacttggctagaatcaagagaatacacaaagcacctgatcaaggttgaaaattggatattcaggaaccct

SEQ ID NO: 326 - DNA, 120 bp, Artificial Sequence
  Description of Artificial Sequence: Synthetic probe
ccacctcactgtgcaacatcttcagaggaagctatctggcaggagcttcccttatctatacagtgacgagaaacgctggcctggttaagagacgtggaggtgggacgggagagactctgg

SEQ ID NO: 327 - DNA, 120 bp, Artificial Sequence
  Description of Artificial Sequence: Synthetic probe
gagactctgggagagaagtggaaagctcgtctgaatcagatgtcggccctggagttctactcttataaaaagtcaggtatcactgaagtgtgtagagaggaggctcgccgtgccctcaag

SEQ ID NO: 328 - DNA, 120 bp, Artificial Sequence
  Description of Artificial Sequence: Synthetic probe
atcaggttgcatctgccggaataacctacacagatagaagatggtgttttgatggcacgaccaacaacaccataatggaagacagtgtgccggcagaggtgtggaccagatacggagaga

SEQ ID NO: 329 - DNA, 120 bp, Artificial Sequence
  Description of Artificial Sequence: Synthetic probe
caaatgaactcggatggctggaaaggacaaaaagtgatatagcttatctgatgggaaggaaagaagaggggacaaccataggattctcaatggatattgatctgcggccagcctctgcct

SEQ ID NO: 330 - DNA, 120 bp, Artificial Sequence
  Description of Artificial Sequence: Synthetic probe
tcccaacacagcgggatgattgtgaatgacataggacatgagaccgatgaaaacagagcaaaagtggaggtcacaccaaactcaccaagagctgaagcgaccctagggggcttcgggagt

SEQ ID NO: 331 - DNA, 120 bp, Artificial Sequence
  Description of Artificial Sequence: Synthetic probe
cttcgggagtttgggactcgattgtgagccaaggaccggtttagatttctccgacctgtactatttaaccatgaacaacaagcattggttggtgcacaaggagtggttccacgacattcc

SEQ ID NO: 332 - DNA, 120 bp, Artificial Sequence
  Description of Artificial Sequence: Synthetic probe
acgacattccattgccatggcacgctggagcggacacagggactccccattggaacaacaaagaggcattggttgagttcaaggatgcccacgccaaaagacagactgttgtcgtgttgg

SEQ ID NO: 333 - DNA, 120 bp, Artificial Sequence
  Description of Artificial Sequence: Synthetic probe
gtcgtgttgggaagtcaggagggtgccgtccacacagccctggcaggagctttggaagcggagatggatggagccaaaggaaggctgttctcaggtcatttgaagtgccggataaagatg

SEQ ID NO: 334 - DNA, 120 bp, Artificial Sequence
  Description of Artificial Sequence: Synthetic probe
tctgttgttggtcgtgctcatacccgagccggagaaacagcgatccccgcaagacaaccaaatggccatcatcatcatggtcgcggtgggactgctgggcctcattgcggccaacgaact

SEQ ID NO: 335 - DNA, 120 bp, Artificial Sequence
  Description of Artificial Sequence: Synthetic probe
ccaacgaacttggctggctggaaagaacaaagagtgacatagctcacctaatgggcaggaaggatgaggagaggatggtggggttctcaattgacatagatctgcggccagcatcggcat

SEQ ID NO: 336 - DNA, 120 bp, Artificial Sequence
  Description of Artificial Sequence: Synthetic probe
gcatcggcatgggccatttatgccgcattgacaaccctcatcaccccggccgttcaacatgcagtcaccacctcctacaacaactactcccttatggcgatggcaacccaagcgggtgtg

SEQ ID NO: 337 - DNA, 120 bp, Artificial Sequence
  Description of Artificial Sequence: Synthetic probe
agcgggtgtgttgttcggcatgggaaaggggatgcctttctacacctgggattttggtgttccactgctgatgattgggtgttattctcaattgacacctctcactctcatagtagccat

SEQ ID NO: 338 - DNA, 120 bp, Artificial Sequence
  Description of Artificial Sequence: Synthetic probe
tagtagccatcaccctgctagtggctcattacatgtacttgattccaggcctgcaggcagcagcagcacgtgctgcccagaagaggacagcagctggcatcatgaagaatcccgttgtgg

SEQ ID NO: 339 - DNA, 120 bp, Artificial Sequence
  Description of Artificial Sequence: Synthetic probe
aataccagagccagagaagcaaagatccccccaggacaatcagatggcaatcattattatggtggcagtgggccttttggggttgataactgcaaatgaacttggatggctggagagaac

SEQ ID NO: 340 - DNA, 120 bp, Artificial Sequence
  Description of Artificial Sequence: Synthetic probe
  modified_base (32)..(32): a, c, t, g, unknown or other
tcccagcacagtgggatgattgttaatgacanaggacatgaaactgatgagaatagagcgaaggttgagataacgcccaattcaccaagagccgaagccaccctgggaggttttggaagc

SEQ ID NO: 341 - DNA, 120 bp, Artificial Sequence
  Description of Artificial Sequence: Synthetic probe
ttttggaagcctaggacttgattgtgaaccgaggacaggccttgacttttcagatttgtattacttgactatgaataacaagcattggttggtgcacaaggagtggttccatgacattcc

SEQ ID NO: 342 - DNA, 120 bp, Artificial Sequence
  Description of Artificial Sequence: Synthetic probe
atgacattccactaccttggcatgctggggcagacaccggaactccacattggaacaacaaagaagcattggtagagttcaaggacgcacatgccaaaaggcaaactgtcgtggttctag

SEQ ID NO: 343 - DNA, 120 bp, Artificial Sequence
  Description of Artificial Sequence: Synthetic probe
ccaatgaactcggatggttggagagaacaaaaagtgacctaggccatctaatgggaaggagagaggagggggcaaccatgggattctcaatggacattgacttgcggccagcctcagctt

SEQ ID NO: 344 - DNA, 120 bp, Artificial Sequence
  Description of Artificial Sequence: Synthetic probe
gcctcagcttgggctatctatgccgctctgacaactctcatcaccccagccgtccaacatgcggtaaccacttcatacaacaactactccttaatggcgatggccacgcaagccggagtg

SEQ ID NO: 345 - DNA, 120 bp, Artificial Sequence
  Description of Artificial Sequence: Synthetic probe
agccggagtgttgtttggcatgggcaaagggatgccattctatgcgtgggacttcggagtcccgctgctaatgatgggttgctactcacaattaacacccttgaccttaatagtggccat

SEQ ID NO: 346 - DNA, 120 bp, Artificial Sequence
  Description of Artificial Sequence: Synthetic probe
cctaaaaatggacaagcttaggttgaagggtgtgtcatattccctgtgtactgcagcgttcacatttaccaaggtcccagctgaaacattgcatggaacagttacagtggaggtgcagta

SEQ ID NO: 347 - DNA, 120 bp, Artificial Sequence
  Description of Artificial Sequence: Synthetic probe
gataaagatggacaagcttaggttgaagggtgtctcatactcattgtgcactgccgccttcacattctcaaaggttccggctgaaacgctgcatgggacagtcacagttgaggtgcagta

SEQ ID NO: 348 - DNA, 120 bp, Artificial Sequence
  Description of Artificial Sequence: Synthetic probe
aggtgcagtatgcgggcagagatggaccttgcaaggtgccagcccaaatggcagtggatatgcagactcttaccccagtgggaaggttgataacggcaaatcccatcataactgagagca

SEQ ID NO: 349 - DNA, 120 bp, Artificial Sequence
  Description of Artificial Sequence: Synthetic probe
actgagagcactgaaaactcgagaatgatgttggagctggacccaccctttggagactcttacattgtcattggggttggagataagaaaattacccatcattggcacagaagtggaagc

SEQ ID NO: 350 - DNA, 120 bp, Artificial Sequence
  Description of Artificial Sequence: Synthetic probe
aagtggaagcacgattgggaaggcatttgaggccactgtgagaggtgcaaaaaggatggcagtcctgggagataccgcctgggattttggttctgttggaggcgtgttcaattctctggg

SEQ ID NO: 351 - DNA, 120 bp, Artificial Sequence
  Description of Artificial Sequence: Synthetic probe
attctctgggcaagggagttcatcaggtcttcggagcagcctttaaatccttatttggcggaatgtcctggttttcacaaattcttattggcacacttttagtgtggttgggcttgaata

SEQ ID NO: 352 - DNA, 120 bp, Artificial Sequence
  Description of Artificial Sequence: Synthetic probe
ccacatctctgtgtaacatctttaggggcagttacctggctggcgcttcccttatttacactgtgacaaggaacgctggtctagtcaagaggcgcggaggaggaacaggagagaccctcg

SEQ ID NO: 353 - DNA, 120 bp, Artificial Sequence
  Description of Artificial Sequence: Synthetic probe
gagaccctcggagaaaagtggaaatctcgattgaatcagatgtcagccctggagttctactcatacaaaaagtcaggaataactgaagtgtgcagggatgaggctcggagggccttgaag

SEQ ID NO: 354 - DNA, 120 bp, Artificial Sequence
  Description of Artificial Sequence: Synthetic probe
ggccttgaaggacggagtggctactggaggacacgcagtatcccgaggaagcgcaaagctcagatggcttgtggagagagggtacctgcagccacatgggaaggttgttgacctaggatg

SEQ ID NO: 355 - DNA, 120 bp, Artificial Sequence
  Description of Artificial Sequence: Synthetic probe
tggaggatcatgggttcggggtatttcacactagtgtctggctcaaggttagagaagattattcattagagtgtgatccagccgttattggaacagctgttaagggaaaggaggctgtac

SEQ ID NO: 356 - DNA, 120 bp, Artificial Sequence
  Description of Artificial Sequence: Synthetic probe
cacgcgggctgtggtaagctgcgctgaagctcccaacatgaagatcattggtaaccgcattgaaaggatccgcagtgagcacgcggaaacgtggttctttgacgagaaccacccatatag

SEQ ID NO: 357 - DNA, 120 bp, Artificial Sequence
  Description of Artificial Sequence: Synthetic probe
tggtccccccatgagagagatcatactcaaggtggtcctgatgaccatctgtggcatgaacccaatagccataccctttgcagctggagcgtggtatgtgtatgtgaagactggaaagag

SEQ ID NO: 358 - DNA, 120 bp, Artificial Sequence
  Description of Artificial Sequence: Synthetic probe
ctggaaagaggagtggtgctctatgggatgtgcctgctcccaaggaagtaaaaaagggggagaccacagatggagtgtatagagtgatgactcgcagactgctaggttcaacacaagttg

SEQ ID NO: 359 - DNA, 120 bp, Artificial Sequence
  Description of Artificial Sequence: Synthetic probe
ctgatggccaacgccatttgttcatctgtgccagttgactgggttccaactgggagaaccacctggtcaatccatggaaagggagaatggatgaccactgaggacatgcttgtggtgtgg

SEQ ID NO: 360 - DNA, 120 bp, Artificial Sequence
  Description of Artificial Sequence: Synthetic probe
tgtggtgtggaacagagtgtggattgaggagaacgaccacatggaggacaagaccccagtcacgaaatggacagacattccctatttgggaaaaagggaagacttatggtgtggatctct

SEQ ID NO: 361 - DNA, 120 bp, Artificial Sequence
  Description of Artificial Sequence: Synthetic probe
gccatcaatgttgaggaagaagcagttaacagtcctggatttgcaccctggagctggaaagacccggagggtccttccagagatagtacgcgaggcaataaagaggaggctccgcactgt

SEQ ID NO: 362 - DNA, 120 bp, Artificial Sequence
  Description of Artificial Sequence: Synthetic probe
tccgcactgtaatcttagcaccaacaagggtagtggcggctgagatggaagaggccttaaggggccttccagttcggtatatgacgccagccataaatgtggcccactctgggaccgaga

SEQ ID NO: 363 - DNA, 120 bp, Artificial Sequence
  Description of Artificial Sequence: Synthetic probe
gggaccgagattgttgacctgatgtgtcatgccacattcacctcgcgtctgttgcagcctatcagagtcccaaactacaacttgtacatcatggatgaggcccatttcacggatccatcg

SEQ ID NO: 364 - DNA, 120 bp, Artificial Sequence
  Description of Artificial Sequence: Synthetic probe
ggatccatcgagcattgcggcaagaggctacatctcgaccagagtggaaatgggggaagcagcagccatcttcatgacagccacgccgccaggcaccagggatgcttttccagattccaa

SEQ ID NO: 365 - DNA, 120 bp, Artificial Sequence
  Description of Artificial Sequence: Synthetic probe
cagattccaactcccctatcatggacacagaaattgaggtcccagaaagagcctggaactcgggtttcgaatgggtgacagatcacgctggcagaacagtgtggtttgttccgagtgtga

SEQ ID NO: 366 - DNA, 120 bp, Artificial Sequence
  Description of Artificial Sequence: Synthetic probe
gcagatactagtgtcggaattgttggcctcctgctgaccacagctatggcagcggaggtcactagacgtgggagtgcatactatatgtacttggacagaaacgatgctggggaggccata

SEQ ID NO: 367 - DNA, 120 bp, Artificial Sequence
  Description of Artificial Sequence: Synthetic probe
ggaggccatatcttttccaaccacattggggatgaataagtgttatatacagatcatggatcttggacacatgtgtgatgccaccatgagctatgaatgccctatgctggatgagggggt

SEQ ID NO: 368 - DNA, 120 bp, Artificial Sequence
  Description of Artificial Sequence: Synthetic probe
gaaagagcaggtgacatcacatgggaaaaggacgcggaagtcactggaaacagtcctcggcttgacgtggcactggatgagagtggtgatttctccttggtagaggaagatggtccaccc

SEQ ID NO: 369 - DNA, 120 bp, Artificial Sequence
  Description of Artificial Sequence: Synthetic probe
gagctcgcgtctcaccaggggcaggatggagcatccgggagactgcctgtcttgcaaaatcatatgcgcagatgtggcagctcctttatttccacagaagagaccttcgactgatggcta

SEQ ID NO: 370 - DNA, 120 bp, Artificial Sequence
  Description of Artificial Sequence: Synthetic probe
aacataattcgtctcaagagtggagtggacgtcttccacatggcggctgagtcgtgtgacactttgctgtgtgacataggtgagtcatcatccagtcctgaagtggaggagacgcgaaca

SEQ ID NO: 371 - DNA, 120 bp, Artificial Sequence
  Description of Artificial Sequence: Synthetic probe
gacgcgaacactcagagtgctctccatggtgggggactggcttgagaagagaccaggggccttctgcataaaggtgttatgcccatacaccagcaccatgatggagaccatggagcgact

SEQ ID NO: 372 - DNA, 120 bp, Artificial Sequence
  Description of Artificial Sequence: Synthetic probe
ctgtgctgaggctcccaacatgaaggtcattggtaggcgcattgagagaatccgtagtgaacatgcagaaacatggttctttgatgaaaaccatccatacaggacatgggcctaccacgg

SEQ ID NO: 373 - DNA, 120 bp, Artificial Sequence
  Description of Artificial Sequence: Synthetic probe
aagaggggatttgtgggatctcctctgtttctagaatggaaaacataatgtggaaatcagtggaaggagagctcaatgcaatcctagaggagaatggagtccaactgacagttgttgtgg

SEQ ID NO: 374 - DNA, 120 bp, Artificial Sequence
  Description of Artificial Sequence: Synthetic probe
tagggcggcaaagaccaacaacagttttgttgtcgacggtgacacattgaaggaatgtccgctcaagcacagagcatggaacagcttcctcgtggaggatcacgggtttggggtcttcca

SEQ ID NO: 375 - DNA, 120 bp, Artificial Sequence
  Description of Artificial Sequence: Synthetic probe
gggtcttccacaccagtgtttggcttaaggttagagaagattactcactggagtgtgacccagccgtcataggaacagctgttaagggaaaggaggccgcgcacagtgatctaggctatt

SEQ ID NO: 376 - DNA, 120 bp, Artificial Sequence
  Description of Artificial Sequence: Synthetic probe
caggtttttggagtttgaatcactggggtttctgaacgaagatcactggatgggaagagaaaactctggaggcggagttgaaggactgggactgcaaagacttggctatatccttgagga

SEQ ID NO: 377 - DNA, 120 bp, Artificial Sequence
  Description of Artificial Sequence: Synthetic probe
tccttgaggagatgagccgggcaccaggaggaaagatgtacgcagatgacactgcgggttgggacaccagaattagcaagtttgacttggaaaatgaggccctgatcaccaaccaaatgg

SEQ ID NO: 378 - DNA, 46 bp, Artificial Sequence
  Description of Artificial Sequence: Synthetic probe
agatcgccgaacagcggcggccggtgtggggaaatccatggtttct

SEQ ID NO: 379 - DNA, 120 bp, Artificial Sequence
  Description of Artificial Sequence: Synthetic probe
agcccttggattcttgaacgaggaccattggatgggaagagaaaactcaggaggtggtgtcgaagggttgggactgcaaagacttggatacgttctagaagaaatgagccgggcaccagg

SEQ ID NO: 380 - DNA, 120 bp, Artificial Sequence
  Description of Artificial Sequence: Synthetic probe
gggcaccaggaggaaagatgtatgcagatgacaccgctggctgggacacccgcattagcaagtttgatttggagaatgaagccttgattactaaccaaatggatgaagggcacagaactc

SEQ ID NO: 381 - DNA, 120 bp, Artificial Sequence
  Description of Artificial Sequence: Synthetic probe
cacagaactctggcgttggccgtgattaagtacacataccaaaacaaagtggtgaaggtcctcagaccagctgaaggaggaaaaacagtcatggacatcatttcaagacaagaccagagg

SEQ ID NO: 382 - DNA, 120 bp, Artificial Sequence
  Description of Artificial Sequence: Synthetic probe
acttatggctgttgaggaagccagagaaagtaaccagatggctgcagagtagcggatgggacagactcaaacgaatggcagtcagtggtgatgactgtgttgtaaagccaattgatgaca

SEQ ID NO: 383 - DNA, 120 bp, Artificial Sequence
  Description of Artificial Sequence: Synthetic probe
catggtgtggaatagagtgtggattgaggagaacgaccacatggaggacaagacccctgttccaaaatggacagaaattccctacttggggaaaagggagtccctatggtgtggatacat

SEQ ID NO: 384 - DNA, 120 bp, Artificial Sequence
  Description of Artificial Sequence: Synthetic probe
ctggcaaacggagtggagccctctgggacataccggcacccaaggaagtgaagaaaggggaaacaactgatggcgtgtatcgtgttatgacccgcagactgttgggctcaacacaggttg

SEQ ID NO: 385 - DNA, 120 bp, Artificial Sequence
  Description of Artificial Sequence: Synthetic probe
acacaggttggagtgggagtcatgcaggagggggttttccacacaatgtggcacgtcacaaaaggggctgcgctgcggagtggagaagggagactggatccgtactggggtgatgtgaag

SEQ ID NO: 386 - DNA, 120 bp, Artificial Sequence
  Description of Artificial Sequence: Synthetic probe
tgatgtgaagcaagacctggtgtcatactgcggaccttggaagttggatgccgcttgggacggactcagcgaggtccaactgttggctgttcctccaggagaaagagctagaaatgtcca

SEQ ID NO: 387 - DNA, 120 bp, Artificial Sequence
  Description of Artificial Sequence: Synthetic probe
gaaatgtccaaactctccctggaatcttcaagaccaaagatggggacattggagcagtggccttagactacccagcggggacatctggatccccaatcctggataaaaacggaagagtca

SEQ ID NO: 388 - DNA, 120 bp, Artificial Sequence
  Description of Artificial Sequence: Synthetic probe
ggaagagtcataggactctatggcaatggagtggtgatcagaaatgggagctatgtgagcgccataacacaaggaaagagagaggaagaggctccgttggagtgctttgagccatcaatg

SEQ ID NO: 389 - DNA, 120 bp, Artificial Sequence
  Description of Artificial Sequence: Synthetic probe
gcagaaatgaacactggaggagacgtagctcacttggcattagtagcggcatttaaagtcagaccagccttgctggtctcatttatcttcagagccaactggacacctcgtgagagcatg

SEQ ID NO: 390 - DNA, 120 bp, Artificial Sequence
  Description of Artificial Sequence: Synthetic probe
tacgtgcaatggccgtgccacgcactgacaacatcgctctagcaattctggctgctctaacaccactagcccgaggcacactgctcgtggcatggagagcgggcctcgccacttgtggag

SEQ ID NO: 391 - DNA, 120 bp, Artificial Sequence
  Description of Artificial Sequence: Synthetic probe
acttgtggagggttcatgctcctctccctgaaagggaaaggtagtgtgaagaagaacctgccattcgtcgcggccttgggattgaccgctgtgagaatagtggaccccattaatgtggtg

SEQ ID NO: 392 - DNA, 120 bp, Artificial Sequence
  Description of Artificial Sequence: Synthetic probe
cgagagtttctggtcatgaaaaacccaaaaaagaaatccggaggattccggattgtcaatatgctaaaacgcggagtagcccgtgtgagcccctttgggggcttgaagaggctgccagcc

SEQ ID NO: 393 - DNA, 120 bp, Artificial Sequence
  Description of Artificial Sequence: Synthetic probe
ttgatgtgccatgccaccttcacttcacgcctactacaacccattagagtccctaattacaacctctacatcatggatgaagcccatttcacagacccctcaagcatagctgcaagagga

SEQ ID NO: 394 - DNA, 120 bp, Artificial Sequence
  Description of Artificial Sequence: Synthetic probe
tcccagcatagcgggatgactgtcaatgatataggatatgaaactgacgaaaatagagcgaaagtcgaggttacgcctaattcaccaagagcggaagcaaccttgggaggctttggaagc

SEQ ID NO: 395 - DNA, 120 bp, Artificial Sequence
  Description of Artificial Sequence: Synthetic probe
gctgtcacgcttccttcccattccacaagaaagttacagacacggtcacaaacctggcttgaatcacgggagtacacgaagcacctgatcaaagttgagaactggatactccggaatcca

SEQ ID NO: 396 - DNA, 120 bp, Artificial Sequence
  Description of Artificial Sequence: Synthetic probe
ccggaatccagggttcacagttgctgctctagcaatggcctggctcttgggaaattccacgagccagcgagtgatctatctggtgatgatcctgttgattgccccggcatacagtatcag

SEQ ID NO: 397 - DNA, 120 bp, Artificial Sequence
  Description of Artificial Sequence: Synthetic probe
cctacaaagcagcggcagcccaactgccggagaccctagagaccatcatgctgctgggactgctaggagcggtgtcaatgggagtgttctttgtattgatgaggaacaaaggcattggga

SEQ ID NO: 398 - DNA, 120 bp, Artificial Sequence
  Description of Artificial Sequence: Synthetic probe
ggcattgggaaaatgggctttggaatggtcactctaggagctagtgcgtggctcatgtggctctcagagatcgaacctgctagaatagcctgcgtcctcattgtggtgtttctgttgttg

SEQ ID NO: 399 - DNA, 13 bp, Artificial Sequence
  Description of Artificial Sequence: Synthetic primer
acttgggttgtgt

SEQ ID NO: 400 - DNA, 13 bp, Artificial Sequence
  Description of Artificial Sequence: Synthetic primer
ggcctggttggca

SEQ ID NO: 401 - DNA, 13 bp, Artificial Sequence
  Description of Artificial Sequence: Synthetic primer
gccactgtgagag

SEQ ID NO: 402 - DNA, 13 bp, Artificial Sequence
  Description of Artificial Sequence: Synthetic primer
gagtcccgctgct

SEQ ID NO: 403 - DNA, 13 bp, Artificial Sequence
  Description of Artificial Sequence: Synthetic primer
gggaagatgggct

SEQ ID NO: 404 - DNA, 13 bp, Artificial Sequence
  Description of Artificial Sequence: Synthetic primer
atgagagtggtga

SEQ ID NO: 405 - DNA, 13 bp, Artificial Sequence
  Description of Artificial Sequence: Synthetic primer
gttggagtgggag

SEQ ID NO: 406 - DNA, 13 bp, Artificial Sequence
  Description of Artificial Sequence: Synthetic primer
ccaacacaaggtg

SEQ ID NO: 407 - DNA, 13 bp, Artificial Sequence
  Description of Artificial Sequence: Synthetic primer
ccatgcctgtcac

SEQ ID NO: 408 - DNA, 13 bp, Artificial Sequence
  Description of Artificial Sequence: Synthetic primer
ctcacaaggagtg

SEQ ID NO: 409 - DNA, 13 bp, Artificial Sequence
  Description of Artificial Sequence: Synthetic primer
caaaatcatatgc

SEQ ID NO: 410 - DNA, 13 bp, Artificial Sequence
  Description of Artificial Sequence: Synthetic primer
agactgcgacagt

SEQ ID NO: 411 - DNA, 13 bp, Artificial Sequence
  Description of Artificial Sequence: Synthetic primer
ttcttcctgaaat

SEQ ID NO: 412 - DNA, 13 bp, Artificial Sequence
  Description of Artificial Sequence: Synthetic primer
gcctcctgctgac

SEQ ID NO: 413 - DNA, 13 bp, Artificial Sequence
  Description of Artificial Sequence: Synthetic primer
tgccagccggact

SEQ ID NO: 414 - DNA, 13 bp, Artificial Sequence
  Description of Artificial Sequence: Synthetic primer
ttgtggaggatca

SEQ ID NO: 415 - DNA, 13 bp, Artificial Sequence
  Description of Artificial Sequence: Synthetic primer
gccccggcataca

SEQ ID NO: 416 - DNA, 13 bp, Artificial Sequence
  Description of Artificial Sequence: Synthetic primer
atctaatgggaag

SEQ ID NO: 417 - DNA, 13 bp, Artificial Sequence
  Description of Artificial Sequence: Synthetic primer
tcaatgagtgacc

SEQ ID NO: 418 - DNA, 13 bp, Artificial Sequence
  Description of Artificial Sequence: Synthetic primer
ccatacaccagca

SEQ ID NO: 419 - DNA, 13 bp, Artificial Sequence
  Description of Artificial Sequence: Synthetic primer
aaaggaagacctt

SEQ ID NO: 420 - DNA, 13 bp, Artificial Sequence
  Description of Artificial Sequence: Synthetic primer
cagtcacagtgga

SEQ ID NO: 421 - DNA, 13 bp, Artificial Sequence
  Description of Artificial Sequence: Synthetic primer
cacaatgccccca

SEQ ID NO: 422 - DNA, 13 bp, Artificial Sequence
  Description of Artificial Sequence: Synthetic primer
aggttcttgaatg

SEQ ID NO: 423 - DNA, 13 bp, Artificial Sequence
  Description of Artificial Sequence: Synthetic primer
atcatacccaagt

SEQ ID NO: 424 - DNA, 13 bp, Artificial Sequence
  Description of Artificial Sequence: Synthetic primer
aaggggagctcaa

SEQ ID NO: 425 - DNA, 13 bp, Artificial Sequence
  Description of Artificial Sequence: Synthetic primer
tgggctctagtgg

SEQ ID NO: 426 - DNA, 13 bp, Artificial Sequence
  Description of Artificial Sequence: Synthetic primer
tcatagcagtagc

SEQ ID NO: 427 - DNA, 13 bp, Artificial Sequence
  Description of Artificial Sequence: Synthetic primer
cagttatggacat

SEQ ID NO: 428 - DNA, 13 bp, Artificial Sequence
  Description of Artificial Sequence: Synthetic primer
gacatgaaactga

SEQ ID NO: 429 - DNA, 13 bp, Artificial Sequence
  Description of Artificial Sequence: Synthetic primer
cagatgtcggccc

SEQ ID NO: 430 - DNA, 13 bp, Artificial Sequence
  Description of Artificial Sequence: Synthetic primer
gaatagccatgac

SEQ ID NO: 431 - DNA, 13 bp, Artificial Sequence
  Description of Artificial Sequence: Synthetic primer
gaggagcggcttt

SEQ ID NO: 432 - DNA, 13 bp, Artificial Sequence
  Description of Artificial Sequence: Synthetic primer
gttccaagcgtga

SEQ ID NO: 433 - DNA, 13 bp, Artificial Sequence
  Description of Artificial Sequence: Synthetic primer
aaaggatggggac

SEQ ID NO: 434 - DNA, 13 bp, Artificial Sequence
  Description of Artificial Sequence: Synthetic primer
ccatccgcaaagt

SEQ ID NO: 435 - DNA, 13 bp, Artificial Sequence
  Description of Artificial Sequence: Synthetic primer
gcccacttcacag

SEQ ID NO: 436 - DNA, 13 bp, Artificial Sequence
  Description of Artificial Sequence: Synthetic primer
gagttcaaggacg

SEQ ID NO: 437 - DNA, 13 bp, Artificial Sequence
  Description of Artificial Sequence: Synthetic primer
gctgcgctgaagc

SEQ ID NO: 438 - DNA, 13 bp, Artificial Sequence
  Description of Artificial Sequence: Synthetic primer
tgcttggccttag

SEQ ID NO: 439 - DNA, 13 bp, Artificial Sequence
  Description of Artificial Sequence: Synthetic primer
gactcggatatgt

SEQ ID NO: 440 - DNA, 13 bp, Artificial Sequence
  Description of Artificial Sequence: Synthetic primer
tgggaaaaaggga

SEQ ID NO: 441 - DNA, 13 bp, Artificial Sequence
  Description of Artificial Sequence: Synthetic primer
tgggaaaccaagc

SEQ ID NO: 442 - DNA, 13 bp, Artificial Sequence
  Description of Artificial Sequence: Synthetic primer
atcaacaggtttt

SEQ ID NO: 443 - DNA, 13 bp, Artificial Sequence
  Description of Artificial Sequence: Synthetic primer
agctgtggcaagc

SEQ ID NO: 444 - DNA, 13 bp, Artificial Sequence
  Description of Artificial Sequence: Synthetic primer
agtgatgatcttc

SEQ ID NO: 445 - DNA, 13 bp, Artificial Sequence
  Description of Artificial Sequence: Synthetic primer
caggaatagctat

SEQ ID NO: 446 - DNA, 13 bp, Artificial Sequence
  Description of Artificial Sequence: Synthetic primer
ttctagaagaaat

SEQ ID NO: 447 - DNA, 13 bp, Artificial Sequence
  Description of Artificial Sequence: Synthetic primer
ccacgccaagagg

SEQ ID NO: 448 - DNA, 13 bp, Artificial Sequence
  Description of Artificial Sequence: Synthetic primer
tgggccctagtgg

SEQ ID NO: 449 - DNA, 13 bp, Artificial Sequence
  Description of Artificial Sequence: Synthetic primer
ttccaagtgtgag

SEQ ID NO: 450 - DNA, 13 bp, Artificial Sequence
  Description of Artificial Sequence: Synthetic primer
ggatacacaaagg

SEQ ID NO: 451 - DNA, 13 bp, Artificial Sequence
  Description of Artificial Sequence: Synthetic primer
gacggctgctggt

SEQ ID NO: 452 - DNA, 13 bp, Artificial Sequence
  Description of Artificial Sequence: Synthetic primer
ctgggaaaagagg

SEQ ID NO: 453 - DNA, 13 bp, Artificial Sequence
  Description of Artificial Sequence: Synthetic primer
ttcaagacaaagg

SEQ ID NO: 454 - DNA, 13 bp, Artificial Sequence
  Description of Artificial Sequence: Synthetic primer
tggacatcatctc

SEQ ID NO: 455 - DNA, 13 bp, Artificial Sequence
  Description of Artificial Sequence: Synthetic primer
atcctagaggaga

SEQ ID NO: 456 - DNA, 13 bp, Artificial Sequence
  Description of Artificial Sequence: Synthetic primer
tacatcatggatg

SEQ ID NO: 457 - DNA, 13 bp, Artificial Sequence
  Description of Artificial Sequence: Synthetic primer
ggagagaagtgga

SEQ ID NO: 458 - DNA, 13 bp, Artificial Sequence
  Description of Artificial Sequence: Synthetic primer
aaagtcgaggtta

SEQ ID NO: 459 - DNA, 13 bp, Artificial Sequence
  Description of Artificial Sequence: Synthetic primer
gtcatgaaaaacc

SEQ ID NO: 460 - DNA, 13 bp, Artificial Sequence
  Description of Artificial Sequence: Synthetic primer
tggatatatccta

SEQ ID NO: 461 - DNA, 13 bp, Artificial Sequence
  Description of Artificial Sequence: Synthetic primer
gtgatctgatcat

SEQ ID NO: 462 - DNA, 13 bp, Artificial Sequence
  Description of Artificial Sequence: Synthetic primer
ggggacattggag

SEQ ID NO: 463 - DNA, 13 bp, Artificial Sequence
  Description of Artificial Sequence: Synthetic primer
cttatggtgtgga

SEQ ID NO: 464 - DNA, 13 bp, Artificial Sequence
  Description of Artificial Sequence: Synthetic primer
ttacagtggaggt

SEQ ID NO: 465 - DNA, 13 bp, Artificial Sequence
  Description of Artificial Sequence: Synthetic primer
tgatgggtgccac

SEQ ID NO: 466 - DNA, 13 bp, Artificial Sequence
  Description of Artificial Sequence: Synthetic primer
gggccatggaccc

SEQ ID NO: 467 - DNA, 13 bp, Artificial Sequence
  Description of Artificial Sequence: Synthetic primer
aggactgggactg

SEQ ID NO: 468 - DNA, 13 bp, Artificial Sequence
  Description of Artificial Sequence: Synthetic primer
ctccagcgccata

SEQ ID NO: 469 - DNA, 13 bp, Artificial Sequence
  Description of Artificial Sequence: Synthetic primer
aactcttggggcc

SEQ ID NO: 470 - DNA, 13 bp, Artificial Sequence
  Description of Artificial Sequence: Synthetic primer
agctggcccccta

SEQ ID NO: 471 - DNA, 13 bp, Artificial Sequence
  Description of Artificial Sequence: Synthetic primer
ctacagccatggc

SEQ ID NO: 472 - DNA, 13 bp, Artificial Sequence
  Description of Artificial Sequence: Synthetic primer
gagtccccaacta

SEQ ID NO: 473 - DNA, 13 bp, Artificial Sequence
  Description of Artificial Sequence: Synthetic primer
cggcaatgagatc

SEQ ID NO: 474 - DNA, 13 bp, Artificial Sequence
  Description of Artificial Sequence: Synthetic primer
aaaagaggagatc

SEQ ID NO: 475 - DNA, 13 bp, Artificial Sequence
  Description of Artificial Sequence: Synthetic primer
gagcaaaggaaaa

SEQ ID NO: 476 - DNA, 13 bp, Artificial Sequence
  Description of Artificial Sequence: Synthetic primer
gtggtgtggatct

SEQ ID NO: 477 - DNA, 13 bp, Artificial Sequence
  Description of Artificial Sequence: Synthetic primer
tccgggctaaaga

SEQ ID NO: 478 - DNA, 13 bp, Artificial Sequence
  Description of Artificial Sequence: Synthetic primer
ctgctgggttcaa

SEQ ID NO: 479 - DNA, 13 bp, Artificial Sequence
  Description of Artificial Sequence: Synthetic primer
caattaacacccc

SEQ ID NO: 480 - DNA, 13 bp, Artificial Sequence
  Description of Artificial Sequence: Synthetic primer
ctgctgggtcatg

SEQ ID NO: 481 - DNA, 13 bp, Artificial Sequence
  Description of Artificial Sequence: Synthetic primer
tctccagtgctgt

SEQ ID NO: 482 - DNA, 13 bp, Artificial Sequence
  Description of Artificial Sequence: Synthetic primer
atacttggtcatg

SEQ ID NO: 483 - DNA, 13 bp, Artificial Sequence
  Description of Artificial Sequence: Synthetic primer
tttccacagaagg

SEQ ID NO: 484 - DNA, 13 bp, Artificial Sequence
  Description of Artificial Sequence: Synthetic primer
atgccctcaggtt

SEQ ID NO: 485 - DNA, 13 bp, Artificial Sequence
  Description of Artificial Sequence: Synthetic primer
ctgtgcccataca

SEQ ID NO: 486 - DNA, 13 bp, Artificial Sequence
  Description of Artificial Sequence: Synthetic primer
cggaggatccgga

SEQ ID NO: 487 - DNA, 13 bp, Artificial Sequence
  Description of Artificial Sequence: Synthetic primer
ttgagattcacgg

SEQ ID NO: 488 - DNA, 13 bp, Artificial Sequence
  Description of Artificial Sequence: Synthetic primer
tcctctaaccact

SEQ ID NO: 489 - DNA, 13 bp, Artificial Sequence
  Description of Artificial Sequence: Synthetic primer
atggcatcccttt

SEQ ID NO: 490 - DNA, 13 bp, Artificial Sequence
  Description of Artificial Sequence: Synthetic primer
ttcactggcctcc

SEQ ID NO: 491 - DNA, 13 bp, Artificial Sequence
  Description of Artificial Sequence: Synthetic primer
tggcatggcacat

SEQ ID NO: 492 - DNA, 13 bp, Artificial Sequence
  Description of Artificial Sequence: Synthetic primer
ctctgccacatcc

SEQ ID NO: 493 - DNA, 13 bp, Artificial Sequence
  Description of Artificial Sequence: Synthetic primer
cttcaaatattgc

SEQ ID NO: 494 - DNA, 13 bp, Artificial Sequence
  Description of Artificial Sequence: Synthetic primer
gatccattctttg

SEQ ID NO: 495 - DNA, 13 bp, Artificial Sequence
  Description of Artificial Sequence: Synthetic primer
gccattgatgtgc

SEQ ID NO: 496 - DNA, 13 bp, Artificial Sequence
  Description of Artificial Sequence: Synthetic primer
accactttgtttt

SEQ ID NO: 497 - DNA, 13 bp, Artificial Sequence
  Description of Artificial Sequence: Synthetic primer
agcaccattcctc

SEQ ID NO: 498 - DNA, 13 bp, Artificial Sequence
  Description of Artificial Sequence: Synthetic primer
gttagctgcttct

SEQ ID NO: 499 - DNA, 13 bp, Artificial Sequence
  Description of Artificial Sequence: Synthetic primer
ctccagtcaccac

SEQ ID NO: 500 - DNA, 13 bp, Artificial Sequence
  Description of Artificial Sequence: Synthetic primer
ggatgctccatcc

SEQ ID NO: 501 - DNA, 13 bp, Artificial Sequence
  Description of Artificial Sequence: Synthetic primer
ttgtcattgtgtc

SEQ ID NO: 502 - DNA, 13 bp, Artificial Sequence
  Description of Artificial Sequence: Synthetic primer
atgttttccattc

SEQ ID NO: 503 - DNA, 13 bp, Artificial Sequence
  Description of Artificial Sequence: Synthetic primer
tcctagcattgat

SEQ ID NO: 504 - DNA, 13 bp, Artificial Sequence
  Description of Artificial Sequence: Synthetic primer
atgttttcatctc

SEQ ID NO: 505 - DNA, 13 bp, Artificial Sequence
  Description of Artificial Sequence: Synthetic primer
atgtctgtccatt

SEQ ID NO: 506 - DNA, 13 bp, Artificial Sequence
  Description of Artificial Sequence: Synthetic primer
actcctatgacaa

SEQ ID NO: 507 - DNA, 13 bp, Artificial Sequence
  Description of Artificial Sequence: Synthetic primer
tccaggctctctc

SEQ ID NO: 508 - DNA, 13 bp, Artificial Sequence
  Description of Artificial Sequence: Synthetic primer
tttcccatgtgat

SEQ ID NO: 509 - DNA, 13 bp, Artificial Sequence
  Description of Artificial Sequence: Synthetic primer
actctccctcaat

SEQ ID NO: 510 - DNA, 13 bp, Artificial Sequence
  Description of Artificial Sequence: Synthetic primer
actttttggctcg

SEQ ID NO: 511 - DNA, 13 bp, Artificial Sequence
  Description of Artificial Sequence: Synthetic primer
tacactccatctg

SEQ ID NO: 512 - DNA, 13 bp, Artificial Sequence
  Description of Artificial Sequence: Synthetic primer
ttcagtgtgtcac

SEQ ID NO: 513 - DNA, 13 bp, Artificial Sequence
  Description of Artificial Sequence: Synthetic primer
tttaggcatctcc

SEQ ID NO: 514 - DNA, 13 bp, Artificial Sequence
  Description of Artificial Sequence: Synthetic primer
taggatcttacct

SEQ ID NO: 515 - DNA, 13 bp, Artificial Sequence
  Description of Artificial Sequence: Synthetic primer
ccagtgtggagtt

SEQ ID NO: 516 - DNA, 13 bp, Artificial Sequence
  Description of Artificial Sequence: Synthetic primer
ttcaagaatccaa

SEQ ID NO: 517 - DNA, 13 bp, Artificial Sequence
  Description of Artificial Sequence: Synthetic primer
gctgggagccatg

SEQ ID NO: 518 - DNA, 13 bp, Artificial Sequence
  Description of Artificial Sequence: Synthetic primer
atgtgaacgctgc

SEQ ID NO: 519 - DNA, 13 bp, Artificial Sequence
  Description of Artificial Sequence: Synthetic primer
catctggttccac

SEQ ID NO: 520 - DNA, 13 bp, Artificial Sequence
  Description of Artificial Sequence: Synthetic primer
ccattcgtttgag

SEQ ID NO: 521 - DNA, 13 bp, Artificial Sequence
  Description of Artificial Sequence: Synthetic primer
gcaggcctgacaa

SEQ ID NO: 522 - DNA, 13 bp, Artificial Sequence
  Description of Artificial Sequence: Synthetic primer
gacttcagggccg

SEQ ID NO: 523 - DNA, 13 bp, Artificial Sequence
  Description of Artificial Sequence: Synthetic primer
ctctctccggggg

SEQ ID NO: 524 - DNA, 13 bp, Artificial Sequence
  Description of Artificial Sequence: Synthetic primer
agatcgcagtttg

SEQ ID NO: 525 - DNA, 13 bp, Artificial Sequence
  Description of Artificial Sequence: Synthetic primer
ccacgtctcttga

SEQ ID NO: 526 - DNA, 13 bp, Artificial Sequence
  Description of Artificial Sequence: Synthetic primer
actgttcccagca

SEQ ID NO: 527 - DNA, 13 bp, Artificial Sequence
  Description of Artificial Sequence: Synthetic primer
cccagggccatga

SEQ ID NO: 528 - DNA, 13 bp, Artificial Sequence
  Description of Artificial Sequence: Synthetic primer
catccgagttcat

SEQ ID NO: 529 - DNA, 13 bp, Artificial Sequence
  Description of Artificial Sequence: Synthetic primer
cccccaccatgga

SEQ ID NO: 530 - DNA, 13 bp, Artificial Sequence
  Description of Artificial Sequence: Synthetic primer
cggcgatctgtgc

SEQ ID NO: 531 - DNA, 13 bp, Artificial Sequence
  Description of Artificial Sequence: Synthetic primer
tcacccaagtagc

SEQ ID NO: 532 - DNA, 13 bp, Artificial Sequence
  Description of Artificial Sequence: Synthetic primer
agagcactctgag

SEQ ID NO: 533 - DNA, 13 bp, Artificial Sequence
  Description of Artificial Sequence: Synthetic primer
gtctcttaaccag

SEQ ID NO: 534 - DNA, 13 bp, Artificial Sequence
  Description of Artificial Sequence: Synthetic primer
ctggtctttccca

SEQ ID NO: 535 - DNA, 13 bp, Artificial Sequence
  Description of Artificial Sequence: Synthetic primer
ccaaggccatgac

SEQ ID NO: 536 - DNA, 13 bp, Artificial Sequence
  Description of Artificial Sequence: Synthetic primer
ttgcagttatcaa

SEQ ID NO: 537 - DNA, 13 bp, Artificial Sequence
  Description of Artificial Sequence: Synthetic primer
aatcgacgtcatc

SEQ ID NO: 538 - DNA, 13 bp, Artificial Sequence
  Description of Artificial Sequence: Synthetic primer
acgaggaccatca

SEQ ID NO: 539 - DNA, 13 bp, Artificial Sequence
  Description of Artificial Sequence: Synthetic primer
ccatccacctcgg

SEQ ID NO: 540 - DNA, 13 bp, Artificial Sequence
  Description of Artificial Sequence: Synthetic primer
tggtgaatgtgaa

SEQ ID NO: 541 - DNA, 13 bp, Artificial Sequence
  Description of Artificial Sequence: Synthetic primer
ccgcatcaagaca

SEQ ID NO: 542 - DNA, 13 bp, Artificial Sequence
  Description of Artificial Sequence: Synthetic primer
tggccctctctcc

SEQ ID NO: 543 - DNA, 13 bp, Artificial Sequence
  Description of Artificial Sequence: Synthetic primer
acgaaaaagattc

SEQ ID NO: 544 - DNA, 13 bp, Artificial Sequence
  Description of Artificial Sequence: Synthetic primer
aagggtggggaag

SEQ ID NO: 545 - DNA, 13 bp, Artificial Sequence
  Description of Artificial Sequence: Synthetic primer
ctgatagcattat

SEQ ID NO: 546 - DNA, 13 bp, Artificial Sequence
  Description of Artificial Sequence: Synthetic primer
gccatccgtttga

SEQ ID NO: 547 - DNA, 13 bp, Artificial Sequence
  Description of Artificial Sequence: Synthetic primer
tccccatccagtg

SEQ ID NO: 548 - DNA, 13 bp, Artificial Sequence
  Description of Artificial Sequence: Synthetic primer
gtgtctgccccag

SEQ ID NO: 549 - DNA, 13 bp, Artificial Sequence
  Description of Artificial Sequence: Synthetic primer
tcttgtcctccat

SEQ ID NO: 550 - DNA, 13 bp, Artificial Sequence
  Description of Artificial Sequence: Synthetic primer
gatattgatgcct

SEQ ID NO: 551 - DNA, 13 bp, Artificial Sequence
  Description of Artificial Sequence: Synthetic primer
cccttcttcgccc

SEQ ID NO: 552 - DNA, 13 bp, Artificial Sequence
  Description of Artificial Sequence: Synthetic primer
ccatctgtggtct

SEQ ID NO: 553 - DNA, 13 bp, Artificial Sequence
  Description of Artificial Sequence: Synthetic primer
cagggctttgaca

SEQ ID NO: 554 - DNA, 13 bp, Artificial Sequence
  Description of Artificial Sequence: Synthetic primer
gcatccatccatc

SEQ ID NO: 555 - DNA, 13 bp, Artificial Sequence
  Description of Artificial Sequence: Synthetic primer
ttccagtgacttc

SEQ ID NO: 556 - DNA, 13 bp, Artificial Sequence
  Description of Artificial Sequence: Synthetic primer
agaggagatcccg

SEQ ID NO: 557 - DNA, 13 bp, Artificial Sequence
  Description of Artificial Sequence: Synthetic primer
tcccccaccatag

SEQ ID NO: 558 - DNA, 13 bp, Artificial Sequence
  Description of Artificial Sequence: Synthetic primer
ttggccactcaca

SEQ ID NO: 559 - DNA, 13 bp, Artificial Sequence
  Description of Artificial Sequence: Synthetic primer
ttcccatccagtg

SEQ ID NO: 560 - DNA, 13 bp, Artificial Sequence
  Description of Artificial Sequence: Synthetic primer
tttgactcagtgt

SEQ ID NO: 561 - DNA, 13 bp, Artificial Sequence
  Description of Artificial Sequence: Synthetic primer
cacaggctgcaca

SEQ ID NO: 562 - DNA, 13 bp, Artificial Sequence
  Description of Artificial Sequence: Synthetic primer
tgtttgtgaggat

SEQ ID NO: 563 - DNA, 13 bp, Artificial Sequence
  Description of Artificial Sequence: Synthetic primer
tgtttgagaatgg

SEQ ID NO: 564 - DNA, 13 bp, Artificial Sequence
  Description of Artificial Sequence: Synthetic primer
tggatggaagaca

SEQ ID NO: 565 - DNA, 13 bp, Artificial Sequence
  Description of Artificial Sequence: Synthetic primer
ccatcattgagct

SEQ ID NO: 566 - DNA, 13 bp, Artificial Sequence
  Description of Artificial Sequence: Synthetic primer
aacagatcactgt

SEQ ID NO: 567 - DNA, 13 bp, Artificial Sequence
  Description of Artificial Sequence: Synthetic primer
caaatgtgggaag

SEQ ID NO: 568 - DNA, 13 bp, Artificial Sequence
  Description of Artificial Sequence: Synthetic primer
gaagaccactggc

SEQ ID NO: 569 - DNA, 13 bp, Artificial Sequence
  Description of Artificial Sequence: Synthetic primer
cccgcgtgttgtc

SEQ ID NO: 570 - DNA, 13 bp, Artificial Sequence
  Description of Artificial Sequence: Synthetic primer
accttggatgtgg

SEQ ID NO: 571 - DNA, 13 bp, Artificial Sequence
  Description of Artificial Sequence: Synthetic primer
tggaggaacagag

SEQ ID NO: 572 - DNA, 13 bp, Artificial Sequence
  Description of Artificial Sequence: Synthetic primer
tgggtgccatgtt

SEQ ID NO: 573 - DNA, 13 bp, Artificial Sequence
  Description of Artificial Sequence: Synthetic primer
tggtgctgcagga

SEQ ID NO: 574 - DNA, 13 bp, Artificial Sequence
  Description of Artificial Sequence: Synthetic primer
acggtttggtttg

SEQ ID NO: 575 - DNA, 13 bp, Artificial Sequence
  Description of Artificial Sequence: Synthetic primer
tgatgaccatggg

SEQ ID NO: 576 - DNA, 13 bp, Artificial Sequence
  Description of Artificial Sequence: Synthetic primer
ttgggggcattac

SEQ ID NO: 577 - DNA, 13 bp, Artificial Sequence
  Description of Artificial Sequence: Synthetic primer
ctgaggttgaaga

SEQ ID NO: 578 - DNA, 13 bp, Artificial Sequence
  Description of Artificial Sequence: Synthetic primer
tcaacaggacttt

SEQ ID NO: 579 - DNA, 13 bp, Artificial Sequence
  Description of Artificial Sequence: Synthetic primer
gccagggtgtact

SEQ ID NO: 580 - DNA, 13 bp, Artificial Sequence
  Description of Artificial Sequence: Synthetic primer
tacaggatcatga

SEQ ID NO: 581 - DNA, 13 bp, Artificial Sequence
  Description of Artificial Sequence: Synthetic primer
ctctcacgtttct

SEQ ID NO: 582 - DNA, 13 bp, Artificial Sequence
  Description of Artificial Sequence: Synthetic primer
acagaaggagaag

SEQ ID NO: 583 - DNA, 13 bp, Artificial Sequence
  Description of Artificial Sequence: Synthetic primer
actgtggagtcgc

SEQ ID NO: 584 - DNA, 13 bp, Artificial Sequence
  Description of Artificial Sequence: Synthetic primer
ccaccaaagctgc

SEQ ID NO: 585 - DNA, 13 bp, Artificial Sequence
  Description of Artificial Sequence: Synthetic primer
agtctggaagcag

SEQ ID NO: 586 - DNA, 13 bp, Artificial Sequence
  Description of Artificial Sequence: Synthetic primer
gactgttggtgca

SEQ ID NO: 587 - DNA, 13 bp, Artificial Sequence
  Description of Artificial Sequence: Synthetic primer
tggcagccaacga

SEQ ID NO: 588 - DNA, 13 bp, Artificial Sequence
  Description of Artificial Sequence: Synthetic primer
tcaatggagtggt

SEQ ID NO: 589 - DNA, 13 bp, Artificial Sequence
  Description of Artificial Sequence: Synthetic primer
ccatggatgggga

SEQ ID NO: 590 - DNA, 13 bp, Artificial Sequence
  Description of Artificial Sequence: Synthetic primer
aggctgatgtctc

SEQ ID NO: 591 - DNA, 13 bp, Artificial Sequence
  Description of Artificial Sequence: Synthetic primer
tgggaaagtgatg

SEQ ID NO: 592 - DNA, 13 bp, Artificial Sequence
  Description of Artificial Sequence: Synthetic primer
gaggattttggat

SEQ ID NO: 593 - DNA, 13 bp, Artificial Sequence
  Description of Artificial Sequence: Synthetic primer
tgtggggcgatgg

SEQ ID NO: 594 - DNA, 13 bp, Artificial Sequence
  Description of Artificial Sequence: Synthetic primer
gtgttggaattgc

SEQ ID NO: 595 - DNA, 13 bp, Artificial Sequence
  Description of Artificial Sequence: Synthetic primer
ctgatgtgttgaa

SEQ ID NO: 596 - DNA, 13 bp, Artificial Sequence
  Description of Artificial Sequence: Synthetic primer
gcaacaccatgca

SEQ ID NO: 597 - DNA, 13 bp, Artificial Sequence
  Description of Artificial Sequence: Synthetic primer
taaagaacatgga

SEQ ID NO: 598 - DNA, 13 bp, Artificial Sequence
  Description of Artificial Sequence: Synthetic primer
cgcgaggcttccc

SEQ ID NO: 599 - DNA, 13 bp, Artificial Sequence
  Description of Artificial Sequence: Synthetic primer
gagcgcaccacac

SEQ ID NO: 600 - DNA, 13 bp, Artificial Sequence
  Description of Artificial Sequence: Synthetic primer
aaaggacctggaa

SEQ ID NO: 601 - DNA, 13 bp, Artificial Sequence
  Description of Artificial Sequence: Synthetic primer
gtggtggaacctg

SEQ ID NO: 602 - DNA, 13 bp, Artificial Sequence
  Description of Artificial Sequence: Synthetic primer
atgattggcctga

SEQ ID NO: 603 - DNA, 13 bp, Artificial Sequence
  Description of Artificial Sequence: Synthetic primer
aggtgcttctggg

SEQ ID NO: 604 - DNA, 13 bp, Artificial Sequence
  Description of Artificial Sequence: Synthetic primer
tcacagggtgccg

SEQ ID NO: 605 - DNA, 13 bp, Artificial Sequence
  Description of Artificial Sequence: Synthetic primer
gactgctggtgca

SEQ ID NO: 606 - DNA, 13 bp, Artificial Sequence
  Description of Artificial Sequence: Synthetic primer
ccatggacgggga

SEQ ID NO: 607 - DNA, 13 bp, Artificial Sequence
  Description of Artificial Sequence: Synthetic primer
gtgtactcagacc

SEQ ID NO: 608 - DNA, 13 bp, Artificial Sequence
  Description of Artificial Sequence: Synthetic primer
gtggggtgatgga

SEQ ID NO: 609 - DNA, 13 bp, Artificial Sequence
  Description of Artificial Sequence: Synthetic primer
gtgttggaactgc

SEQ ID NO: 610 - DNA, 13 bp, Artificial Sequence
  Description of Artificial Sequence: Synthetic primer
ttgggggtattac

SEQ ID NO: 611 - DNA, 13 bp, Artificial Sequence
  Description of Artificial Sequence: Synthetic primer
aaaacgtccagac

SEQ ID NO: 612 - DNA, 13 bp, Artificial Sequence
  Description of Artificial Sequence: Synthetic primer
gctatgctgagtc

SEQ ID NO: 613 - DNA, 13 bp, Artificial Sequence
  Description of Artificial Sequence: Synthetic primer
gccaatgaaatgg

SEQ ID NO: 614 - DNA, 13 bp, Artificial Sequence
  Description of Artificial Sequence: Synthetic primer
ggaagcaacacaa

SEQ ID NO: 615 - DNA, 13 bp, Artificial Sequence
  Description of Artificial Sequence: Synthetic primer
gaagaacaccgca

SEQ ID NO: 616 - DNA, 13 bp, Artificial Sequence
  Description of Artificial Sequence: Synthetic primer
gtcatgcagaaaa

SEQ ID NO: 617 - DNA, 13 bp, Artificial Sequence
  Description of Artificial Sequence: Synthetic primer
ttgggctgatcgc

SEQ ID NO: 618 - DNA, 13 bp, Artificial Sequence
  Description of Artificial Sequence: Synthetic primer
atggaagagtcat

SEQ ID NO: 619 - DNA, 13 bp, Artificial Sequence
  Description of Artificial Sequence: Synthetic primer
tggagtttgaaga

SEQ ID NO: 620 - DNA, 13 bp, Artificial Sequence
  Description of Artificial Sequence: Synthetic primer
acgtccaagccag

SEQ ID NO: 621 - DNA, 13 bp, Artificial Sequence
  Description of Artificial Sequence: Synthetic primer
ggataactgagta

SEQ ID NO: 622 - DNA, 13 bp, Artificial Sequence
  Description of Artificial Sequence: Synthetic primer
tgcaaaggaaagg

SEQ ID NO: 623 - DNA, 13 bp, Artificial Sequence
  Description of Artificial Sequence: Synthetic primer
caggagtgttcaa

SEQ ID NO: 624 - DNA, 13 bp, Artificial Sequence
  Description of Artificial Sequence: Synthetic primer
ggagcgatgtttg

SEQ ID NO: 625 - DNA, 13 bp, Artificial Sequence
  Description of Artificial Sequence: Synthetic primer
atgggaagtgcct

SEQ ID NO: 626 - DNA, 13 bp, Artificial Sequence
  Description of Artificial Sequence: Synthetic primer
gcacaaatctggg

SEQ ID NO: 627 - DNA, 13 bp, Artificial Sequence
  Description of Artificial Sequence: Synthetic primer
ttgtggatctcgg

SEQ ID NO: 628 - DNA, 13 bp, Artificial Sequence
  Description of Artificial Sequence: Synthetic primer
tgcaccctccctc

SEQ ID NO: 629 - DNA, 13 bp, Artificial Sequence
  Description of Artificial Sequence: Synthetic primer
cttgtgaatgggg

SEQ ID NO: 630 - DNA, 13 bp, Artificial Sequence
  Description of Artificial Sequence: Synthetic primer
cggttggaggagt

SEQ ID NO: 631 - DNA, 13 bp, Artificial Sequence
  Description of Artificial Sequence: Synthetic primer
ggaacagtatgga

SEQ ID NO: 632 - DNA, 13 bp, Artificial Sequence
  Description of Artificial Sequence: Synthetic primer
caggcctcaagag

SEQ ID NO: 633 - DNA, 13 bp, Artificial Sequence
  Description of Artificial Sequence: Synthetic primer
gttgaatctcatg

SEQ ID NO: 634 - DNA, 13 bp, Artificial Sequence
  Description of Artificial Sequence: Synthetic primer
tagcttcggtcag

SEQ ID NO: 635 - DNA, 13 bp, Artificial Sequence
  Description of Artificial Sequence: Synthetic primer
tctccaggggctg

SEQ ID NO: 636 - DNA, 13 bp, Artificial Sequence
  Description of Artificial Sequence: Synthetic primer
gcgtttacagaat

SEQ ID NO: 637 - DNA, 13 bp, Artificial Sequence
  Description of Artificial Sequence: Synthetic primer
tcacaggctctag

SEQ ID NO: 638 - DNA, 13 bp, Artificial Sequence
  Description of Artificial Sequence: Synthetic primer
gctttctggagtt

SEQ ID NO: 639 - DNA, 13 bp, Artificial Sequence
  Description of Artificial Sequence: Synthetic primer
cacagcaattgct

SEQ ID NO: 640 - DNA, 13 bp, Artificial Sequence
  Description of Artificial Sequence: Synthetic primer
gtttcttagcacg

SEQ ID NO: 641 - DNA, 13 bp, Artificial Sequence
  Description of Artificial Sequence: Synthetic primer
gtgaaggacgagc

SEQ ID NO: 642 - DNA, 13 bp, Artificial Sequence
  Description of Artificial Sequence: Synthetic primer
gaggaggaaagac

SEQ ID NO: 643 - DNA, 13 bp, Artificial Sequence
  Description of Artificial Sequence: Synthetic primer
cctgtgtgagctg

SEQ ID NO: 644 - DNA, 13 bp, Artificial Sequence
  Description of Artificial Sequence: Synthetic primer
acacccatcatgc

SEQ ID NO: 645 - DNA, 13 bp, Artificial Sequence
  Description of Artificial Sequence: Synthetic primer
ctgagatgctgag

SEQ ID NO: 646 - DNA, 13 bp, Artificial Sequence
  Description of Artificial Sequence: Synthetic primer
cactattcacact

SEQ ID NO: 647 - DNA, 13 bp, Artificial Sequence
  Description of Artificial Sequence: Synthetic primer
tccataacatgga

SEQ ID NO: 648 - DNA, 13 bp, Artificial Sequence
  Description of Artificial Sequence: Synthetic primer
ttgtgtttgtcgt

SEQ ID NO: 649 - DNA, 13 bp, Artificial Sequence
  Description of Artificial Sequence: Synthetic primer
gggagatccctga

SEQ ID NO: 650 - DNA, 13 bp, Artificial Sequence
  Description of Artificial Sequence: Synthetic primer
accattggcacaa

SEQ ID NO: 651 - DNA, 13 bp, Artificial Sequence
  Description of Artificial Sequence: Synthetic primer
atagaggagaatg

SEQ ID NO: 652 - DNA, 13 bp, Artificial Sequence
  Description of Artificial Sequence: Synthetic primer
agaatcgcgcttg

SEQ ID NO: 653 - DNA, 13 bp, Artificial Sequence
  Description of Artificial Sequence: Synthetic primer
gaaagagttgatg

SEQ ID NO: 654 - DNA, 13 bp, Artificial Sequence
  Description of Artificial Sequence: Synthetic primer
tgtgaacaaacaa

SEQ ID NO: 655 - DNA, 13 bp, Artificial Sequence
  Description of Artificial Sequence: Synthetic primer
gagctcacatacc

SEQ ID NO: 656 - DNA, 13 bp, Artificial Sequence
  Description of Artificial Sequence: Synthetic primer
gtgacttgataat

SEQ ID NO: 657 - DNA, 13 bp, Artificial Sequence
  Description of Artificial Sequence: Synthetic primer
tcctctcaaaacc

SEQ ID NO: 658 - DNA, 13 bp, Artificial Sequence
  Description of Artificial Sequence: Synthetic primer
ccatggatggaga

SEQ ID NO: 659 - DNA, 13 bp, Artificial Sequence
  Description of Artificial Sequence: Synthetic primer
agggggacacgac

SEQ ID NO: 660 - DNA, 13 bp, Artificial Sequence
  Description of Artificial Sequence: Synthetic primer
agatgggttggct

SEQ ID NO: 661 - DNA, 13 bp, Artificial Sequence
  Description of Artificial Sequence: Synthetic primer
gtcagcgatctct

SEQ ID NO: 662 - DNA, 13 bp, Artificial Sequence
  Description of Artificial Sequence: Synthetic primer
taggcagagctcg

SEQ ID NO: 663 - DNA, 13 bp, Artificial Sequence
  Description of Artificial Sequence: Synthetic primer
gacacaggtcacg

SEQ ID NO: 664 - DNA, 13 bp, Artificial Sequence
  Description of Artificial Sequence: Synthetic primer
tacgaatggatca

SEQ ID NO: 665 - DNA, 13 bp, Artificial Sequence
  Description of Artificial Sequence: Synthetic primer
ctactccacacag

SEQ ID NO: 666 - DNA, 13 bp, Artificial Sequence
  Description of Artificial Sequence: Synthetic primer
agcggaagggcat

SEQ ID NO: 667 - DNA, 13 bp, Artificial Sequence
  Description of Artificial Sequence: Synthetic primer
accaggagggccc

SEQ ID NO: 668 - DNA, 13 bp, Artificial Sequence
  Description of Artificial Sequence: Synthetic primer
atttgtgttggct

SEQ ID NO: 669 - DNA, 13 bp, Artificial Sequence
  Description of Artificial Sequence: Synthetic primer
atcgtcacaaagt

SEQ ID NO: 670 - DNA, 13 bp, Artificial Sequence
  Description of Artificial Sequence: Synthetic primer
tgatcctgggaga

SEQ ID NO: 671 - DNA, 13 bp, Artificial Sequence
  Description of Artificial Sequence: Synthetic primer
gcatggctgtcag

SEQ ID NO: 672 - DNA, 13 bp, Artificial Sequence
  Description of Artificial Sequence: Synthetic primer
cttgctgctggac

SEQ ID NO: 673 - DNA, 13 bp, Artificial Sequence
  Description of Artificial Sequence: Synthetic primer
gcaccaaatgtgg

SEQ ID NO: 674 - DNA, 13 bp, Artificial Sequence
  Description of Artificial Sequence: Synthetic primer
caccttaccacca

SEQ ID NO: 675 - DNA, 13 bp, Artificial Sequence
  Description of Artificial Sequence: Synthetic primer
ctagtcctggtgt

SEQ ID NO: 676 - DNA, 13 bp, Artificial Sequence
  Description of Artificial Sequence: Synthetic primer
tgaccagccaggt

SEQ ID NO: 677 - DNA, 13 bp, Artificial Sequence
  Description of Artificial Sequence: Synthetic primer
tacgtcaggtatg

SEQ ID NO: 678 - DNA, 13 bp, Artificial Sequence
  Description of Artificial Sequence: Synthetic primer
tggaacggtggtg

SEQ ID NO: 679 - DNA, 13 bp, Artificial Sequence
  Description of Artificial Sequence: Synthetic primer
agaacgttaagaa

SEQ ID NO: 680 - DNA, 13 bp, Artificial Sequence
  Description of Artificial Sequence: Synthetic primer
caggcagcaccgt

SEQ ID NO: 681 - DNA, 13 bp, Artificial Sequence
  Description of Artificial Sequence: Synthetic primer
gtccacctcttgc

SEQ ID NO: 682 - DNA, 13 bp, Artificial Sequence
  Description of Artificial Sequence: Synthetic primer
gccacatgaacca

SEQ ID NO: 683 - DNA, 13 bp, Artificial Sequence
  Description of Artificial Sequence: Synthetic primer
cccatccacaaca

SEQ ID NO: 684 - DNA, 13 bp, Artificial Sequence
  Description of Artificial Sequence: Synthetic primer
acatgacatcaac

SEQ ID NO: 685 - DNA, 13 bp, Artificial Sequence
  Description of Artificial Sequence: Synthetic primer
tccacatacttct

SEQ ID NO: 686 - DNA, 13 bp, Artificial Sequence
  Description of Artificial Sequence: Synthetic primer
cattcataagtga

SEQ ID NO: 687 - DNA, 13 bp, Artificial Sequence
  Description of Artificial Sequence: Synthetic primer
gcatgttgatgtt

SEQ ID NO: 688 - DNA, 13 bp, Artificial Sequence
  Description of Artificial Sequence: Synthetic primer
ctcctctctttgt

SEQ ID NO: 689 - DNA, 13 bp, Artificial Sequence
  Description of Artificial Sequence: Synthetic primer
caaaggtgttgtt

SEQ ID NO: 690 - DNA, 13 bp, Artificial Sequence
  Description of Artificial Sequence: Synthetic primer
gttgttcccttca

SEQ ID NO: 691 - DNA, 13 bp, Artificial Sequence
  Description of Artificial Sequence: Synthetic primer
aagccatttgaaa

SEQ ID NO: 692 - DNA, 13 bp, Artificial Sequence
  Description of Artificial Sequence: Synthetic primer
catgatttgactt

SEQ ID NO: 693 - DNA, 13 bp, Artificial Sequence
  Description of Artificial Sequence: Synthetic primer
gctcctttctttt

SEQ ID NO: 694 - DNA, 13 bp, Artificial Sequence
  Description of Artificial Sequence: Synthetic primer
ttcgtgatgactt

SEQ ID NO: 695 - DNA, 13 bp, Artificial Sequence
  Description of Artificial Sequence: Synthetic primer
ttgtcatccactc

SEQ ID NO: 696 - DNA, 13 bp, Artificial Sequence
  Description of Artificial Sequence: Synthetic primer
gttgttctcctct

SEQ ID NO: 697 - DNA, 13 bp, Artificial Sequence
  Description of Artificial Sequence: Synthetic primer
aaccactcacgat

SEQ ID NO: 698 - DNA, 13 bp, Artificial Sequence
  Description of Artificial Sequence: Synthetic primer
tctcaatccacat

SEQ ID NO: 699 - DNA, 13 bp, Artificial Sequence
  Description of Artificial Sequence: Synthetic primer
tccatcctttcac

SEQ ID NO: 700 - DNA, 13 bp, Artificial Sequence
  Description of Artificial Sequence: Synthetic primer
ctccgatgtcaca

SEQ ID NO: 701 - DNA, 13 bp, Artificial Sequence
  Description of Artificial Sequence: Synthetic primer
ccaacccccacgc

SEQ ID NO: 702 - DNA, 13 bp, Artificial Sequence
  Description of Artificial Sequence: Synthetic primer
cttccatctttca

SEQ ID NO: 703 - DNA, 13 bp, Artificial Sequence
  Description of Artificial Sequence: Synthetic primer
atcaccctgctcg

SEQ ID NO: 704 - DNA, 13 bp, Artificial Sequence
  Description of Artificial Sequence: Synthetic primer
ggcagttcctcca

SEQ ID NO: 705 - DNA, 13 bp, Artificial Sequence
  Description of Artificial Sequence: Synthetic primer
ccgcacactcctt

SEQ ID NO: 706 - DNA, 13 bp, Artificial Sequence
  Description of Artificial Sequence: Synthetic primer
ccatccactacag

SEQ ID NO: 707 - DNA, 13 bp, Artificial Sequence
  Description of Artificial Sequence: Synthetic primer
caaatcaggaaca

SEQ ID NO: 708 - DNA, 13 bp, Artificial Sequence
  Description of Artificial Sequence: Synthetic primer
tagttccaggttc

SEQ ID NO: 709 - DNA, 13 bp, Artificial Sequence
  Description of Artificial Sequence: Synthetic primer
ctagagactggat

SEQ ID NO: 710 - DNA, 13 bp, Artificial Sequence
  Description of Artificial Sequence: Synthetic primer
gtttctccacatc

SEQ ID NO: 711 - DNA, 13 bp, Artificial Sequence
  Description of Artificial Sequence: Synthetic primer
atgtaatctgacg

SEQ ID NO: 712 - DNA, 13 bp, Artificial Sequence
  Description of Artificial Sequence: Synthetic primer
cctctgccaggtt

SEQ ID NO: 713 - DNA, 13 bp, Artificial Sequence
  Description of Artificial Sequence: Synthetic primer
agacgccgatgtt

SEQ ID NO: 714 - DNA, 13 bp, Artificial Sequence
  Description of Artificial Sequence: Synthetic primer
tccgggatctcag

SEQ ID NO: 715 - DNA, 13 bp, Artificial Sequence
  Description of Artificial Sequence: Synthetic primer
ctttccgctctct

SEQ ID NO: 716 - DNA, 13 bp, Artificial Sequence
  Description of Artificial Sequence: Synthetic primer
cctctcgagagca

SEQ ID NO: 717 - DNA, 13 bp, Artificial Sequence
  Description of Artificial Sequence: Synthetic primer
accagggcatatc

SEQ ID NO: 718 - DNA, 13 bp, Artificial Sequence
  Description of Artificial Sequence: Synthetic primer
acctcatcctgcc

SEQ ID NO: 719 - DNA, 13 bp, Artificial Sequence
  Description of Artificial Sequence: Synthetic primer
cccaatacatctc

SEQ ID NO: 720 - DNA, 13 bp, Artificial Sequence
  Description of Artificial Sequence: Synthetic primer
ccacttcgtactt

SEQ ID NO: 721 - DNA, 13 bp, Artificial Sequence
  Description of Artificial Sequence: Synthetic primer
ttgagctccgccg

SEQ ID NO: 722 - DNA, 13 bp, Artificial Sequence
  Description of Artificial Sequence: Synthetic primer
cccagtacatctc

SEQ ID NO: 723 - DNA, 13 bp, Artificial Sequence
  Description of Artificial Sequence: Synthetic primer
tcatacttgatgt

SEQ ID NO: 724 - DNA, 13 bp, Artificial Sequence
  Description of Artificial Sequence: Synthetic primer
ctctcgatccaca

SEQ ID NO: 725 - DNA, 13 bp, Artificial Sequence
  Description of Artificial Sequence: Synthetic primer
catttttcatgat

SEQ ID NO: 726 - DNA, 13 bp, Artificial Sequence
  Description of Artificial Sequence: Synthetic primer
tctccaatgtcac

SEQ ID NO: 727 - DNA, 13 bp, Artificial Sequence
  Description of Artificial Sequence: Synthetic primer
tcatccattctcc

SEQ ID NO: 728 - DNA, 13 bp, Artificial Sequence
  Description of Artificial Sequence: Synthetic primer
tgttgatgtagtc

SEQ ID NO: 729 - DNA, 13 bp, Artificial Sequence
  Description of Artificial Sequence: Synthetic primer
ttcatgatcagtt

SEQ ID NO: 730 - DNA, 13 bp, Artificial Sequence
  Description of Artificial Sequence: Synthetic primer
ctgctccatggca

SEQ ID NO: 731 - DNA, 13 bp, Artificial Sequence
  Description of Artificial Sequence: Synthetic primer
tccaggctctgtc

SEQ ID NO: 732 - DNA, 13 bp, Artificial Sequence
  Description of Artificial Sequence: Synthetic primer
cttccattctctc

SEQ ID NO: 733 - DNA, 13 bp, Artificial Sequence
  Description of Artificial Sequence: Synthetic primer
cactctcagtggt

SEQ ID NO: 734 - DNA, 13 bp, Artificial Sequence
  Description of Artificial Sequence: Synthetic primer
gcatccatccaat

SEQ ID NO: 735 - DNA, 13 bp, Artificial Sequence
  Description of Artificial Sequence: Synthetic primer
cctcttcccacca

SEQ ID NO: 736 - DNA, 13 bp, Artificial Sequence
  Description of Artificial Sequence: Synthetic primer
cttccatgttcat

SEQ ID NO: 737 - DNA, 13 bp, Artificial Sequence
  Description of Artificial Sequence: Synthetic primer
tcttttgttttgt

SEQ ID NO: 738 - DNA, 13 bp, Artificial Sequence
  Description of Artificial Sequence: Synthetic primer
ccatcctcctcgc

SEQ ID NO: 739 - DNA, 13 bp, Artificial Sequence
  Description of Artificial Sequence: Synthetic primer
tcacttcatagct

SEQ ID NO: 740 - DNA, 13 bp, Artificial Sequence
  Description of Artificial Sequence: Synthetic primer
agttcaagaacct

SEQ ID NO: 741 - DNA, 13 bp, Artificial Sequence
  Description of Artificial Sequence: Synthetic primer
ggacctcatcatg

SEQ ID NO: 742 - DNA, 13 bp, Artificial Sequence
  Description of Artificial Sequence: Synthetic primer
ccactaaccaccg

SEQ ID NO: 743 - DNA, 13 bp, Artificial Sequence
  Description of Artificial Sequence: Synthetic primer
ggccttttccttt

SEQ ID NO: 744 - DNA, 13 bp, Artificial Sequence
  Description of Artificial Sequence: Synthetic primer
ctgcatgtgcttt

SEQ ID NO: 745 - DNA, 13 bp, Artificial Sequence
  Description of Artificial Sequence: Synthetic primer
attgtctgaaggg

SEQ ID NO: 746 - DNA, 13 bp, Artificial Sequence
  Description of Artificial Sequence: Synthetic primer
cacatcctgggtt

SEQ ID NO: 747 - DNA, 13 bp, Artificial Sequence
  Description of Artificial Sequence: Synthetic primer
ctgtcgatcactc

SEQ ID NO: 748 - DNA, 13 bp, Artificial Sequence
  Description of Artificial Sequence: Synthetic primer
gtgtgagcacaca

SEQ ID NO: 749 - DNA, 13 bp, Artificial Sequence
  Description of Artificial Sequence: Synthetic primer
ctttcaccaagct

SEQ ID NO: 750 - DNA, 13 bp, Artificial Sequence
  Description of Artificial Sequence: Synthetic primer
gcccctttctttt

SEQ ID NO: 751 - DNA, 13 bp, Artificial Sequence
  Description of Artificial Sequence: Synthetic primer
tttctcctcaaaa

SEQ ID NO: 752 - DNA, 13 bp, Artificial Sequence
  Description of Artificial Sequence: Synthetic primer
taagccatttgga

SEQ ID NO: 753 - DNA, 13 bp, Artificial Sequence
  Description of Artificial Sequence: Synthetic primer
tgtcttcatatct

SEQ ID NO: 754 - DNA, 13 bp, Artificial Sequence
  Description of Artificial Sequence: Synthetic primer
atgatttaacttc

SEQ ID NO: 755 - DNA, 13 bp, Artificial Sequence
  Description of Artificial Sequence: Synthetic primer
catatgttgttcc

SEQ ID NO: 756 - DNA, 13 bp, Artificial Sequence
  Description of Artificial Sequence: Synthetic primer
ccttggtctccgg

SEQ ID NO: 757 - DNA, 13 bp, Artificial Sequence
  Description of Artificial Sequence: Synthetic primer
cctttggtgaggg

SEQ ID NO: 758 - DNA, 13 bp, Artificial Sequence
  Description of Artificial Sequence: Synthetic primer
tccagggtcctcc

SEQ ID NO: 759 - DNA, 13 bp, Artificial Sequence
  Description of Artificial Sequence: Synthetic primer
actcaacttccgg

SEQ ID NO: 760 - DNA, 13 bp, Artificial Sequence
  Description of Artificial Sequence: Synthetic primer
atcagtccgtttg

SEQ ID NO: 761 - DNA, 13 bp, Artificial Sequence
  Description of Artificial Sequence: Synthetic primer
cacattctgggac

SEQ ID NO: 762 - DNA, 13 bp, Artificial Sequence
  Description of Artificial Sequence: Synthetic primer
gccgacagcactg

SEQ ID NO: 763 - DNA, 13 bp, Artificial Sequence
  Description of Artificial Sequence: Synthetic primer
tggcaggtccacg

SEQ ID NO: 764 - DNA, 13 bp, Artificial Sequence
  Description of Artificial Sequence: Synthetic primer
agcatccaaccaa

SEQ ID NO: 765 - DNA, 13 bp, Artificial Sequence
  Description of Artificial Sequence: Synthetic primer
ccacttcatactt

SEQ ID NO: 766 - DNA, 13 bp, Artificial Sequence
  Description of Artificial Sequence: Synthetic primer
aatctcatttcca

SEQ ID NO: 767 - DNA, 13 bp, Artificial Sequence
  Description of Artificial Sequence: Synthetic primer
agccacataaacc

SEQ ID NO: 768 - DNA, 13 bp, Artificial Sequence
  Description of Artificial Sequence: Synthetic primer
tcacatcataact

SEQ ID NO: 769 - DNA, 13 bp, Artificial Sequence
  Description of Artificial Sequence: Synthetic primer
gctggttgtctgt

SEQ ID NO: 770 - DNA, 13 bp, Artificial Sequence
  Description of Artificial Sequence: Synthetic primer
gttttgctgtgcc

SEQ ID NO: 771 - DNA, 13 bp, Artificial Sequence
  Description of Artificial Sequence: Synthetic primer
agagccaagcata

SEQ ID NO: 772 - DNA, 13 bp, Artificial Sequence
  Description of Artificial Sequence: Synthetic primer
ccccatcaagcaa

SEQ ID NO: 773 - DNA, 13 bp, Artificial Sequence
  Description of Artificial Sequence: Synthetic primer
gcatgttaatgtt

SEQ ID NO: 774 - DNA, 13 bp, Artificial Sequence
  Description of Artificial Sequence: Synthetic primer
gaactgccctttc

SEQ ID NO: 775 - DNA, 13 bp, Artificial Sequence
  Description of Artificial Sequence: Synthetic primer
gcctccatattca

SEQ ID NO: 776 - DNA, 13 bp, Artificial Sequence
  Description of Artificial Sequence: Synthetic primer
ttattgaggtcaa

SEQ ID NO: 777 - DNA, 13 bp, Artificial Sequence
  Description of Artificial Sequence: Synthetic primer
tcttccggctgtc

SEQ ID NO: 778 - DNA, 13 bp, Artificial Sequence
  Description of Artificial Sequence: Synthetic primer
accaccagtgttc

SEQ ID NO: 779 - DNA, 13 bp, Artificial Sequence
  Description of Artificial Sequence: Synthetic primer
ctgactttgggtc

SEQ ID NO: 780 - DNA, 13 bp, Artificial Sequence
  Description of Artificial Sequence: Synthetic primer
tgatgcccatcca

SEQ ID NO: 781 - DNA, 13 bp, Artificial Sequence
  Description of Artificial Sequence: Synthetic primer
ctgggatctcagt

SEQ ID NO: 782 - DNA, 13 bp, Artificial Sequence
  Description of Artificial Sequence: Synthetic primer
ttcatacctcctc

SEQ ID NO: 783 - DNA, 13 bp, Artificial Sequence
  Description of Artificial Sequence: Synthetic primer
agagcatctggca

SEQ ID NO: 784 - DNA, 13 bp, Artificial Sequence
  Description of Artificial Sequence: Synthetic primer
tttatgcatactt

SEQ ID NO: 785 - DNA, 13 bp, Artificial Sequence
  Description of Artificial Sequence: Synthetic primer
tggttgatagcca

SEQ ID NO: 786 - DNA, 13 bp, Artificial Sequence
  Description of Artificial Sequence: Synthetic primer
aggttgaggtcca

SEQ ID NO: 787 - DNA, 13 bp, Artificial Sequence
  Description of Artificial Sequence: Synthetic primer
attcccatccaca

SEQ ID NO: 788 - DNA, 13 bp, Artificial Sequence
  Description of Artificial Sequence: Synthetic primer
ccacattgcctga

SEQ ID NO: 789 - DNA, 13 bp, Artificial Sequence
  Description of Artificial Sequence: Synthetic primer
gatgtggcagagt

SEQ ID NO: 790 - DNA, 13 bp, Artificial Sequence
  Description of Artificial Sequence: Synthetic primer
actgatcgtagac

SEQ ID NO: 791 - DNA, 13 bp, Artificial Sequence
  Description of Artificial Sequence: Synthetic primer
ttagagagcagat

SEQ ID NO: 792 - DNA, 13 bp, Artificial Sequence
  Description of Artificial Sequence: Synthetic primer
acaccagaaggga

SEQ ID NO: 793 - DNA, 13 bp, Artificial Sequence
  Description of Artificial Sequence: Synthetic primer
aaccaagatgaac

SEQ ID NO: 794 - DNA, 13 bp, Artificial Sequence
  Description of Artificial Sequence: Synthetic primer
aaaccaacattgg

SEQ ID NO: 795 - DNA, 13 bp, Artificial Sequence
  Description of Artificial Sequence: Synthetic primer
ggacaaaagaagg

SEQ ID NO: 796 - DNA, 13 bp, Artificial Sequence
  Description of Artificial Sequence: Synthetic primer
gatgaggaaagag

SEQ ID NO: 797 - DNA, 13 bp, Artificial Sequence
  Description of Artificial Sequence: Synthetic primer
aacccatggatgg

SEQ ID NO: 798 - DNA, 13 bp, Artificial Sequence
  Description of Artificial Sequence: Synthetic primer
gaacacacaggaa

SEQ ID NO: 799 - DNA, 13 bp, Artificial Sequence
  Description of Artificial Sequence: Synthetic primer
ggtttgtggagag

SEQ ID NO: 800 - DNA, 13 bp, Artificial Sequence
  Description of Artificial Sequence: Synthetic primer
tggctagatgggg

SEQ ID NO: 801 - DNA, 13 bp, Artificial Sequence
  Description of Artificial Sequence: Synthetic primer
gacagccattgca

SEQ ID NO: 802 - DNA, 13 bp, Artificial Sequence
  Description of Artificial Sequence: Synthetic primer
ggaccatgaaaat

SEQ ID NO: 803 - DNA, 13 bp, Artificial Sequence
  Description of Artificial Sequence: Synthetic primer
cccaagacaacca

SEQ ID NO: 804 - DNA, 13 bp, Artificial Sequence
  Description of Artificial Sequence: Synthetic primer
aacatgtgcaccc

SEQ ID NO: 805 - DNA, 13 bp, Artificial Sequence
  Description of Artificial Sequence: Synthetic primer
caatgaaagaaaa

SEQ ID NO: 806 - DNA, 13 bp, Artificial Sequence
  Description of Artificial Sequence: Synthetic primer
gaagaggtgatga

SEQ ID NO: 807 - DNA, 13 bp, Artificial Sequence
  Description of Artificial Sequence: Synthetic primer
taccagagattga

SEQ ID NO: 808 - DNA, 13 bp, Artificial Sequence
  Description of Artificial Sequence: Synthetic primer
agagaggagttca

SEQ ID NO: 809 - DNA, 13 bp, Artificial Sequence
  Description of Artificial Sequence: Synthetic primer
tgaacattgtgga

SEQ ID NO: 810 - DNA, 13 bp, Artificial Sequence
  Description of Artificial Sequence: Synthetic primer
atagaaagtgaaa

SEQ ID NO: 811 - DNA, 13 bp, Artificial Sequence
  Description of Artificial Sequence: Synthetic primer
aaggcatgggagg

SEQ ID NO: 812 - DNA, 13 bp, Artificial Sequence
  Description of Artificial Sequence: Synthetic primer
gtggtgataggtt

SEQ ID NO: 813 - DNA, 13 bp, Artificial Sequence
  Description of Artificial Sequence: Synthetic primer
gatcagcctcatc

SEQ ID NO: 814 - DNA, 13 bp, Artificial Sequence
  Description of Artificial Sequence: Synthetic primer
gtgatattggtga

SEQ ID NO: 815 - DNA, 13 bp, Artificial Sequence
  Description of Artificial Sequence: Synthetic primer
cagtcaacattga

SEQ ID NO: 816 - DNA, 13 bp, Artificial Sequence
  Description of Artificial Sequence: Synthetic primer
tagcaggagcagg

SEQ ID NO: 817 - DNA, 13 bp, Artificial Sequence
  Description of Artificial Sequence: Synthetic primer
aagaagtgcaggt

SEQ ID NO: 818 - DNA, 13 bp, Artificial Sequence
  Description of Artificial Sequence: Synthetic primer
cagacaccataga

SEQ ID NO: 819 - DNA, 13 bp, Artificial Sequence
  Description of Artificial Sequence: Synthetic primer
tatgggacacacc

SEQ ID NO: 820 - DNA, 13 bp, Artificial Sequence
  Description of Artificial Sequence: Synthetic primer
gaagctcagccga

SEQ ID NO: 821 - DNA, 13 bp, Artificial Sequence
  Description of Artificial Sequence: Synthetic primer
cttggtttcatga

SEQ ID NO: 822 - DNA, 13 bp, Artificial Sequence
  Description of Artificial Sequence: Synthetic primer
aaacaacatggct

SEQ ID NO: 823 - DNA, 13 bp, Artificial Sequence
  Description of Artificial Sequence: Synthetic primer
gtggagacttggg

SEQ ID NO: 824 - DNA, 13 bp, Artificial Sequence
  Description of Artificial Sequence: Synthetic primer
aagtgtgtgacaa

SEQ ID NO: 825 - DNA, 13 bp, Artificial Sequence
  Description of Artificial Sequence: Synthetic primer
gctaaaatcatag

SEQ ID NO: 826 - DNA, 13 bp, Artificial Sequence
  Description of Artificial Sequence: Synthetic primer
attgttgcaatag

SEQ ID NO: 827 - DNA, 13 bp, Artificial Sequence
  Description of Artificial Sequence: Synthetic primer
caacagcagggat

SEQ ID NO: 828 - DNA, 13 bp, Artificial Sequence
  Description of Artificial Sequence: Synthetic primer
tggacaaaggaag

SEQ ID NO: 829 - DNA, 13 bp, Artificial Sequence
  Description of Artificial Sequence: Synthetic primer
gaacagggtgtgg

SEQ ID NO: 830 - DNA, 13 bp, Artificial Sequence
  Description of Artificial Sequence: Synthetic primer
cgaaaggctgaaa

SEQ ID NO: 831 - DNA, 13 bp, Artificial Sequence
  Description of Artificial Sequence: Synthetic primer
tagaagcagaacc

SEQ ID NO: 832 - DNA, 13 bp, Artificial Sequence
  Description of Artificial Sequence: Synthetic primer
tggcatctgtgga

SEQ ID NO: 833 - DNA, 13 bp, Artificial Sequence
  Description of Artificial Sequence: Synthetic primer
ggatcagcatcat

SEQ ID NO: 834 - DNA, 13 bp, Artificial Sequence
  Description of Artificial Sequence: Synthetic primer
agggttatagacc

SEQ ID NO: 835 - DNA, 13 bp, Artificial Sequence
  Description of Artificial Sequence: Synthetic primer
attgtgtcagcag

SEQ ID NO: 836 - DNA, 13 bp, Artificial Sequence
  Description of Artificial Sequence: Synthetic primer
gtgacatagggga

SEQ ID NO: 837 - DNA, 13 bp, Artificial Sequence
  Description of Artificial Sequence: Synthetic primer
tagtgtcatcagt

SEQ ID NO: 838 - DNA, 13 bp, Artificial Sequence
  Description of Artificial Sequence: Synthetic primer
cagagaattgaaa

SEQ ID NO: 839 - DNA, 13 bp, Artificial Sequence
  Description of Artificial Sequence: Synthetic primer
aaggaatcattcc

SEQ ID NO: 840 - DNA, 13 bp, Artificial Sequence
  Description of Artificial Sequence: Synthetic primer
acacatggaagat

SEQ ID NO: 841 - DNA, 13 bp, Artificial Sequence
  Description of Artificial Sequence: Synthetic primer
cggattggatacc

SEQ ID NO: 842 - DNA, 13 bp, Artificial Sequence
  Description of Artificial Sequence: Synthetic primer
ccagaatcccctt

SEQ ID NO: 843 - DNA, 13 bp, Artificial Sequence
  Description of Artificial Sequence: Synthetic primer
gacccaagacggt

SEQ ID NO: 844 - DNA, 13 bp, Artificial Sequence
  Description of Artificial Sequence: Synthetic primer
ggaaatagaggac

SEQ ID NO: 845 - DNA, 13 bp, Artificial Sequence
  Description of Artificial Sequence: Synthetic primer
taccaaaacaagg

SEQ ID NO: 846 - DNA, 13 bp, Artificial Sequence
  Description of Artificial Sequence: Synthetic primer
tgagaatggacaa

SEQ ID NO: 847 - DNA, 13 bp, Artificial Sequence
  Description of Artificial Sequence: Synthetic primer
catgcaaaaagaa

SEQ ID NO: 848 - DNA, 13 bp, Artificial Sequence
  Description of Artificial Sequence: Synthetic primer
ccagagaagaatt

SEQ ID NO: 849 - DNA, 13 bp, Artificial Sequence
  Description of Artificial Sequence: Synthetic primer
ggaacgaaacatg

SEQ ID NO: 850 - DNA, 13 bp, Artificial Sequence
  Description of Artificial Sequence: Synthetic primer
tggactatgaaaa

SEQ ID NO: 851 - DNA, 13 bp, Artificial Sequence
  Description of Artificial Sequence: Synthetic primer
tgactctaaaagg

SEQ ID NO: 852 - DNA, 13 bp, Artificial Sequence
  Description of Artificial Sequence: Synthetic primer
agtgaactgccgg

SEQ ID NO: 853 - DNA, 13 bp, Artificial Sequence
  Description of Artificial Sequence: Synthetic primer
agtttgaagccct

SEQ ID NO: 854 - DNA, 13 bp, Artificial Sequence
  Description of Artificial Sequence: Synthetic primer
tggacttgggaga

SEQ ID NO: 855 - DNA, 13 bp, Artificial Sequence
  Description of Artificial Sequence: Synthetic primer
ggaataacagtga

SEQ ID NO: 856 - DNA, 13 bp, Artificial Sequence
  Description of Artificial Sequence: Synthetic primer
cttggctggtgca

SEQ ID NO: 857 - DNA, 13 bp, Artificial Sequence
  Description of Artificial Sequence: Synthetic primer
atgtgtcatgcca

SEQ ID NO: 858 - DNA, 13 bp, Artificial Sequence
  Description of Artificial Sequence: Synthetic primer
ggagtattgtggg

SEQ ID NO: 859 - DNA, 13 bp, Artificial Sequence
  Description of Artificial Sequence: Synthetic primer
gcattgaagacaa

SEQ ID NO: 860 - DNA, 13 bp, Artificial Sequence
  Description of Artificial Sequence: Synthetic primer
ggacttctctttt

SEQ ID NO: 861 - DNA, 13 bp, Artificial Sequence
  Description of Artificial Sequence: Synthetic primer
ttggaactggaga

SEQ ID NO: 862 - DNA, 13 bp, Artificial Sequence
  Description of Artificial Sequence: Synthetic primer
gccctactggcta

SEQ ID NO: 863 - DNA, 13 bp, Artificial Sequence
  Description of Artificial Sequence: Synthetic primer
cagctatagccaa

SEQ ID NO: 864 - DNA, 13 bp, Artificial Sequence
  Description of Artificial Sequence: Synthetic primer
aaaatgctctcca

SEQ ID NO: 865 - DNA, 13 bp, Artificial Sequence
  Description of Artificial Sequence: Synthetic primer
caagagtggggcg

SEQ ID NO: 866 - DNA, 13 bp, Artificial Sequence
  Description of Artificial Sequence: Synthetic primer
gaaggagcttgga

SEQ ID NO: 867 - DNA, 13 bp, Artificial Sequence
  Description of Artificial Sequence: Synthetic primer
caagatgaagaaa

SEQ ID NO: 868 - DNA, 13 bp, Artificial Sequence
  Description of Artificial Sequence: Synthetic primer
gaacctccttttg

SEQ ID NO: 869 - DNA, 13 bp, Artificial Sequence
  Description of Artificial Sequence: Synthetic primer
gtgacattggaga

SEQ ID NO: 870 - DNA, 13 bp, Artificial Sequence
  Description of Artificial Sequence: Synthetic primer
atgataaatggag

SEQ ID NO: 871 - DNA, 13 bp, Artificial Sequence
  Description of Artificial Sequence: Synthetic primer
atagagggaaaag

SEQ ID NO: 872 - DNA, 13 bp, Artificial Sequence
  Description of Artificial Sequence: Synthetic primer
ccaagaagatgtc

SEQ ID NO: 873 - DNA, 13 bp, Artificial Sequence
  Description of Artificial Sequence: Synthetic primer
caatagacctaga

SEQ ID NO: 874 - DNA, 13 bp, Artificial Sequence
  Description of Artificial Sequence: Synthetic primer
acaatggaaacac

SEQ ID NO: 875 - DNA, 13 bp, Artificial Sequence
  Description of Artificial Sequence: Synthetic primer
tagtgacagctga

SEQ ID NO: 876 - DNA, 13 bp, Artificial Sequence
  Description of Artificial Sequence: Synthetic primer
caagggaagagtt

SEQ ID NO: 877 - DNA, 13 bp, Artificial Sequence
  Description of Artificial Sequence: Synthetic primer
aaggagtggagag

SEQ ID NO: 878 - DNA, 13 bp, Artificial Sequence
  Description of Artificial Sequence: Synthetic primer
gggacaagaggcc

SEQ ID NO: 879 - DNA, 13 bp, Artificial Sequence
  Description of Artificial Sequence: Synthetic primer
aaaagaatggaag

SEQ ID NO: 880 - DNA, 13 bp, Artificial Sequence
  Description of Artificial Sequence: Synthetic primer
caggagctgggct

SEQ ID NO: 881 - DNA, 13 bp, Artificial Sequence
  Description of Artificial Sequence: Synthetic primer
taccaaaacaaag

SEQ ID NO: 882 - DNA, 13 bp, Artificial Sequence
  Description of Artificial Sequence: Synthetic primer
atgaggaaaacag

SEQ ID NO: 883 - DNA, 13 bp, Artificial Sequence
  Description of Artificial Sequence: Synthetic primer
gaactcaagggga

SEQ ID NO: 884 - DNA, 13 bp, Artificial Sequence
  Description of Artificial Sequence: Synthetic primer
tgctactgaacag

SEQ ID NO: 885 - DNA, 13 bp, Artificial Sequence
  Description of Artificial Sequence: Synthetic primer
ggagccaggtacc

SEQ ID NO: 886 - DNA, 13 bp, Artificial Sequence
  Description of Artificial Sequence: Synthetic primer
tggatggtacata

SEQ ID NO: 887 - DNA, 13 bp, Artificial Sequence
  Description of Artificial Sequence: Synthetic primer
aggtgcaggttat

SEQ ID NO: 888 - DNA, 13 bp, Artificial Sequence
  Description of Artificial Sequence: Synthetic primer
atgagatccagat

SEQ ID NO: 889 - DNA, 13 bp, Artificial Sequence
  Description of Artificial Sequence: Synthetic primer
atggcaacaacgt

SEQ ID NO: 890 - DNA, 13 bp, Artificial Sequence
  Description of Artificial Sequence: Synthetic primer
cgtcagcagacct

SEQ ID NO: 891 - DNA, 13 bp, Artificial Sequence
  Description of Artificial Sequence: Synthetic primer
accatggctaaga

SEQ ID NO: 892 - DNA, 13 bp, Artificial Sequence
  Description of Artificial Sequence: Synthetic primer
aaaattggaatag

SEQ ID NO: 893 - DNA, 13 bp, Artificial Sequence
  Description of Artificial Sequence: Synthetic primer
ggaattgatgatg

SEQ ID NO: 894 - DNA, 13 bp, Artificial Sequence
  Description of Artificial Sequence: Synthetic primer
ggcgttctatggg

SEQ ID NO: 895 - DNA, 13 bp, Artificial Sequence
  Description of Artificial Sequence: Synthetic primer
acatgtgtaccct

SEQ ID NO: 896 - DNA, 13 bp, Artificial Sequence
  Description of Artificial Sequence: Synthetic primer
tccctaacagcca

SEQ ID NO: 897 - DNA, 13 bp, Artificial Sequence
  Description of Artificial Sequence: Synthetic primer
aagcttgcttaac

SEQ ID NO: 898 - DNA, 13 bp, Artificial Sequence
  Description of Artificial Sequence: Synthetic primer
aatgcagaaccag

SEQ ID NO: 899 - DNA, 13 bp, Artificial Sequence
  Description of Artificial Sequence: Synthetic primer
ccaacagcaggaa

SEQ ID NO: 900 - DNA, 13 bp, Artificial Sequence
  Description of Artificial Sequence: Synthetic primer
gggtaatagaccc

SEQ ID NO: 901 - DNA, 13 bp, Artificial Sequence
  Description of Artificial Sequence: Synthetic primer
agactaaaaatgg

SEQ ID NO: 902 - DNA, 13 bp, Artificial Sequence
  Description of Artificial Sequence: Synthetic primer
tgaacatgacatc

SEQ ID NO: 903 - DNA, 13 bp, Artificial Sequence
  Description of Artificial Sequence: Synthetic primer
atgtgtcacgcca

SEQ ID NO: 904 - DNA, 13 bp, Artificial Sequence
  Description of Artificial Sequence: Synthetic primer
aagaaagagaaat

SEQ ID NO: 905 - DNA, 13 bp, Artificial Sequence
  Description of Artificial Sequence: Synthetic primer
ggttcgtcgagag

SEQ ID NO: 906 - DNA, 13 bp, Artificial Sequence
  Description of Artificial Sequence: Synthetic primer
tggcatccgtgga

SEQ ID NO: 907 - DNA, 13 bp, Artificial Sequence
  Description of Artificial Sequence: Synthetic primer
tatcaaaacaagg

SEQ ID NO: 908 - DNA, 13 bp, Artificial Sequence
  Description of Artificial Sequence: Synthetic primer
tggttcgtggaga

SEQ ID NO: 909 - DNA, 13 bp, Artificial Sequence
  Description of Artificial Sequence: Synthetic primer
atttccctgacag

SEQ ID NO: 910 - DNA, 13 bp, Artificial Sequence
  Description of Artificial Sequence: Synthetic primer
aaaccaaccttgg

SEQ ID NO: 911 - DNA, 13 bp, Artificial Sequence
  Description of Artificial Sequence: Synthetic primer
tatcaaaacaaag

SEQ ID NO: 912 - DNA, 13 bp, Artificial Sequence
  Description of Artificial Sequence: Synthetic primer
atggcgtcgaaag

SEQ ID NO: 913 - DNA, 13 bp, Artificial Sequence
  Description of Artificial Sequence: Synthetic primer
tcctttcccaaag

SEQ ID NO: 914 - DNA, 13 bp, Artificial Sequence
  Description of Artificial Sequence: Synthetic primer
tcatagccatcct

SEQ ID NO: 915 - DNA, 13 bp, Artificial Sequence
  Description of Artificial Sequence: Synthetic primer
tgacgacgatggc

SEQ ID NO: 916 - DNA, 13 bp, Artificial Sequence
  Description of Artificial Sequence: Synthetic primer
ttgcaatagattt

SEQ ID NO: 917 - DNA, 13 bp, Artificial Sequence
  Description of Artificial Sequence: Synthetic primer
aatttgaagccct

SEQ ID NO: 918 - DNA, 13 bp, Artificial Sequence
  Description of Artificial Sequence: Synthetic primer
accaggcagtggt

SEQ ID NO: 919 - DNA, 13 bp, Artificial Sequence
  Description of Artificial Sequence: Synthetic primer
tgcactctcattg

SEQ ID NO: 920 - DNA, 13 bp, Artificial Sequence
  Description of Artificial Sequence: Synthetic primer
aacgcagaaccag

SEQ ID NO: 921 - DNA, 13 bp, Artificial Sequence
  Description of Artificial Sequence: Synthetic primer
gacatctcaagtg

SEQ ID NO: 922 - DNA, 13 bp, Artificial Sequence
  Description of Artificial Sequence: Synthetic primer
tggaacagagtgt

SEQ ID NO: 923 - DNA, 13 bp, Artificial Sequence
  Description of Artificial Sequence: Synthetic primer
tcataggagcaga

SEQ ID NO: 924 - DNA, 13 bp, Artificial Sequence
  Description of Artificial Sequence: Synthetic primer
acaatccagagat

SEQ ID NO: 925 - DNA, 13 bp, Artificial Sequence
  Description of Artificial Sequence: Synthetic primer
acgtcccttcacc

SEQ ID NO: 926 - DNA, 13 bp, Artificial Sequence
  Description of Artificial Sequence: Synthetic primer
ggagctacttggc

SEQ ID NO: 927 - DNA, 13 bp, Artificial Sequence
  Description of Artificial Sequence: Synthetic primer
gttatcaagaatg

SEQ ID NO: 928 - DNA, 13 bp, Artificial Sequence
  Description of Artificial Sequence: Synthetic primer
gttccatgtagaa

SEQ ID NO: 929 - DNA, 13 bp, Artificial Sequence
  Description of Artificial Sequence: Synthetic primer
acgtgtgctaagt

SEQ ID NO: 930 - DNA, 13 bp, Artificial Sequence
  Description of Artificial Sequence: Synthetic primer
ccatggtgaacgg

SEQ ID NO: 931 - DNA, 13 bp, Artificial Sequence
  Description of Artificial Sequence: Synthetic primer
accaagccacagt

SEQ ID NO: 932 - DNA, 13 bp, Artificial Sequence
  Description of Artificial Sequence: Synthetic primer
tgaacaggttcac

SEQ ID NO: 933 - DNA, 13 bp, Artificial Sequence
  Description of Artificial Sequence: Synthetic primer
gaaaggtcatgga

SEQ ID NO: 934 - DNA, 13 bp, Artificial Sequence
  Description of Artificial Sequence: Synthetic primer
gagagctcaaaaa

SEQ ID NO: 935 - DNA, 13 bp, Artificial Sequence
  Description of Artificial Sequence: Synthetic primer
tggccatgacaac

SEQ ID NO: 936 - DNA, 13 bp, Artificial Sequence
  Description of Artificial Sequence: Synthetic primer
tggactagagagg

SEQ ID NO: 937 - DNA, 13 bp, Artificial Sequence
  Description of Artificial Sequence: Synthetic primer
tagaaccaatatc

SEQ ID NO: 938 - DNA, 13 bp, Artificial Sequence
  Description of Artificial Sequence: Synthetic primer
gaaataacagcac

SEQ ID NO: 939 - DNA, 13 bp, Artificial Sequence
  Description of Artificial Sequence: Synthetic primer
atagaggaaggaa

SEQ ID NO: 940 - DNA, 13 bp, Artificial Sequence
  Description of Artificial Sequence: Synthetic primer
tgacatgtgcgaa

SEQ ID NO: 941 - DNA, 13 bp, Artificial Sequence
  Description of Artificial Sequence: Synthetic primer
ggagagtgataga

SEQ ID NO: 942 - DNA, 13 bp, Artificial Sequence
  Description of Artificial Sequence: Synthetic primer
attatcccagccc

SEQ ID NO: 943 - DNA, 13 bp, Artificial Sequence
  Description of Artificial Sequence: Synthetic primer
gagaaatggctga

SEQ ID NO: 944 - DNA, 13 bp, Artificial Sequence
  Description of Artificial Sequence: Synthetic primer
ctcataaagaatg

SEQ ID NO: 945 - DNA, 13 bp, Artificial Sequence
  Description of Artificial Sequence: Synthetic primer
tgtcactagagaa

SEQ ID NO: 946 - DNA, 13 bp, Artificial Sequence
  Description of Artificial Sequence: Synthetic primer
acaagacaatcaa

SEQ ID NO: 947 - DNA, 13 bp, Artificial Sequence
  Description of Artificial Sequence: Synthetic primer
agccagattatga

SEQ ID NO: 948 - DNA, 13 bp, Artificial Sequence
  Description of Artificial Sequence: Synthetic primer
aagggatcattcc

SEQ ID NO: 949 - DNA, 13 bp, Artificial Sequence
  Description of Artificial Sequence: Synthetic primer
ctcatagccatgg

SEQ ID NO: 950 - DNA, 13 bp, Artificial Sequence
  Description of Artificial Sequence: Synthetic primer
ccatctttgagga

SEQ ID NO: 951 - DNA, 13 bp, Artificial Sequence
  Description of Artificial Sequence: Synthetic primer
tggcttccggtgc

SEQ ID NO: 952 - DNA, 13 bp, Artificial Sequence
  Description of Artificial Sequence: Synthetic primer
tcatgcttgtagc

SEQ ID NO: 953 - DNA, 13 bp, Artificial Sequence
  Description of Artificial Sequence: Synthetic primer
gggacaaagaaga

SEQ ID NO: 954 - DNA, 13 bp, Artificial Sequence
  Description of Artificial Sequence: Synthetic primer
tggaagaatgctt

SEQ ID NO: 955 - DNA, 13 bp, Artificial Sequence
  Description of Artificial Sequence: Synthetic primer
ccagagtccccag

SEQ ID NO: 956 - DNA, 13 bp, Artificial Sequence
  Description of Artificial Sequence: Synthetic primer
gagtctcatggat

SEQ ID NO: 957 - DNA, 13 bp, Artificial Sequence
  Description of Artificial Sequence: Synthetic primer
ccagagacacaga

SEQ ID NO: 958 - DNA, 13 bp, Artificial Sequence
  Description of Artificial Sequence: Synthetic primer
caaaagggaaagt

SEQ ID NO: 959 - DNA, 13 bp, Artificial Sequence
  Description of Artificial Sequence: Synthetic primer
gaattagaacccc

SEQ ID NO: 960 - DNA, 13 bp, Artificial Sequence
  Description of Artificial Sequence: Synthetic primer
aaagcaaaaatct

SEQ ID NO: 961 - DNA, 13 bp, Artificial Sequence
  Description of Artificial Sequence: Synthetic primer
ggcaaagcgaaaa

SEQ ID NO: 962 - DNA, 13 bp, Artificial Sequence
  Description of Artificial Sequence: Synthetic primer
gccctccagaagt

SEQ ID NO: 963 - DNA, 13 bp, Artificial Sequence
  Description of Artificial Sequence: Synthetic primer
tggcttggagcac

SEQ ID NO: 964 - DNA, 13 bp, Artificial Sequence
  Description of Artificial Sequence: Synthetic primer
tacaaagagtgga

SEQ ID NO: 965 - DNA, 13 bp, Artificial Sequence
  Description of Artificial Sequence: Synthetic primer
gtgattgacctag

SEQ ID NO: 966 - DNA, 13 bp, Artificial Sequence
  Description of Artificial Sequence: Synthetic primer
tgctgcagatgga

SEQ ID NO: 967 - DNA, 13 bp, Artificial Sequence
  Description of Artificial Sequence: Synthetic primer
ccaaccaggcagc

SEQ ID NO: 968 - DNA, 13 bp, Artificial Sequence
  Description of Artificial Sequence: Synthetic primer
gaaggggcttgga

SEQ ID NO: 969 - DNA, 13 bp, Artificial Sequence
  Description of Artificial Sequence: Synthetic primer
caaagatcaggag

SEQ ID NO: 970 - DNA, 13 bp, Artificial Sequence
  Description of Artificial Sequence: Synthetic primer
tggaacacgggag

SEQ ID NO: 971 - DNA, 13 bp, Artificial Sequence
  Description of Artificial Sequence: Synthetic primer
cgttgatgctcct

SEQ ID NO: 972 - DNA, 13 bp, Artificial Sequence
  Description of Artificial Sequence: Synthetic primer
gacgtaagatggg

SEQ ID NO: 973 - DNA, 13 bp, Artificial Sequence
  Description of Artificial Sequence: Synthetic primer
agctgacctatca

SEQ ID NO: 974 - DNA, 13 bp, Artificial Sequence
  Description of Artificial Sequence: Synthetic primer
ggagtctcttggg

SEQ ID NO: 975 - DNA, 13 bp, Artificial Sequence
  Description of Artificial Sequence: Synthetic primer
gtctggaataggg

SEQ ID NO: 976 - DNA, 13 bp, Artificial Sequence
  Description of Artificial Sequence: Synthetic primer
ggaattaatgatg

SEQ ID NO: 977 - DNA, 13 bp, Artificial Sequence
  Description of Artificial Sequence: Synthetic primer
gaaaggcgaaaat

SEQ ID NO: 978 - DNA, 13 bp, Artificial Sequence
  Description of Artificial Sequence: Synthetic primer
tcaagccatcagg

SEQ ID NO: 979 - DNA, 13 bp, Artificial Sequence
  Description of Artificial Sequence: Synthetic primer
cacaagggaagaa

SEQ ID NO: 980 - DNA, 13 bp, Artificial Sequence
  Description of Artificial Sequence: Synthetic primer
ggacaaaagaggg

SEQ ID NO: 981 - DNA, 13 bp, Artificial Sequence
  Description of Artificial Sequence: Synthetic primer
caatcatggatga

SEQ ID NO: 982 - DNA, 13 bp, Artificial Sequence
  Description of Artificial Sequence: Synthetic primer
tagaagaaggaag

SEQ ID NO: 983 - DNA, 13 bp, Artificial Sequence
  Description of Artificial Sequence: Synthetic primer
aggtctcctggga

SEQ ID NO: 984 - DNA, 13 bp, Artificial Sequence
  Description of Artificial Sequence: Synthetic primer
tggacattgaact

SEQ ID NO: 985 - DNA, 13 bp, Artificial Sequence
  Description of Artificial Sequence: Synthetic primer
tggaaaaacatgg

SEQ ID NO: 986 - DNA, 13 bp, Artificial Sequence
  Description of Artificial Sequence: Synthetic primer
gtgataggcatac

SEQ ID NO: 987 - DNA, 13 bp, Artificial Sequence
  Description of Artificial Sequence: Synthetic primer
atgtgccatgcca

SEQ ID NO: 988 - DNA, 13 bp, Artificial Sequence
  Description of Artificial Sequence: Synthetic primer
gaagaaatgctca

SEQ ID NO: 989 - DNA, 13 bp, Artificial Sequence
  Description of Artificial Sequence: Synthetic primer
gttccatgcagaa

SEQ ID NO: 990 - DNA, 13 bp, Artificial Sequence
  Description of Artificial Sequence: Synthetic primer
gagaccctggaga

SEQ ID NO: 991 - DNA, 13 bp, Artificial Sequence
  Description of Artificial Sequence: Synthetic primer
agattgttgatct

SEQ ID NO: 992 - DNA, 13 bp, Artificial Sequence
  Description of Artificial Sequence: Synthetic primer
agaagttcttctt

SEQ ID NO: 993 - DNA, 13 bp, Artificial Sequence
  Description of Artificial Sequence: Synthetic primer
gagaagcaatgca

SEQ ID NO: 994 - DNA, 13 bp, Artificial Sequence
  Description of Artificial Sequence: Synthetic primer
aaaaagcagcaga

SEQ ID NO: 995 - DNA, 13 bp, Artificial Sequence
  Description of Artificial Sequence: Synthetic primer
ttgaggcagaacc

SEQ ID NO: 996 - DNA, 13 bp, Artificial Sequence
  Description of Artificial Sequence: Synthetic primer
cctgtgctatgtt

SEQ ID NO: 997 - DNA, 13 bp, Artificial Sequence
  Description of Artificial Sequence: Synthetic primer
aggtcaaacgcag

SEQ ID NO: 998 - DNA, 13 bp, Artificial Sequence
  Description of Artificial Sequence: Synthetic primer
atagagcttcaga

SEQ ID NO: 999 - DNA, 13 bp, Artificial Sequence
  Description of Artificial Sequence: Synthetic primer
taccaaaataagg

SEQ ID NO: 1000 - DNA, 13 bp, Artificial Sequence
  Description of Artificial Sequence: Synthetic primer
ctgactccccaaa

SEQ ID NO: 1001 - DNA, 13 bp, Artificial Sequence
  Description of Artificial Sequence: Synthetic primer
ggggtctcatgga

SEQ ID NO: 1002 - DNA, 13 bp, Artificial Sequence
  Description of Artificial Sequence: Synthetic primer
tggtttgtggaaa

SEQ ID NO: 1003 - DNA, 13 bp, Artificial Sequence
  Description of Artificial Sequence: Synthetic primer
agttctaacagtt

SEQ ID NO: 1004 - DNA, 13 bp, Artificial Sequence
  Description of Artificial Sequence: Synthetic primer
cagctctctttga

SEQ ID NO: 1005 - DNA, 13 bp, Artificial Sequence
  Description of Artificial Sequence: Synthetic primer
ggacacttgaaat

SEQ ID NO: 1006 - DNA, 13 bp, Artificial Sequence
  Description of Artificial Sequence: Synthetic primer
gttgtcaagaatg

SEQ ID NO: 1007 - DNA, 13 bp, Artificial Sequence
  Description of Artificial Sequence: Synthetic primer
cacaatggcaaaa

SEQ ID NO: 1008 - DNA, 13 bp, Artificial Sequence
  Description of Artificial Sequence: Synthetic primer
gcttcagctatcc

SEQ ID NO: 1009 - DNA, 13 bp, Artificial Sequence
  Description of Artificial Sequence: Synthetic primer
tctttaagaacaa

SEQ ID NO: 1010 - DNA, 13 bp, Artificial Sequence
  Description of Artificial Sequence: Synthetic primer
aaagcatggatgg

SEQ ID NO: 1011 - DNA, 13 bp, Artificial Sequence
  Description of Artificial Sequence: Synthetic primer
gaactagagagag

SEQ ID NO: 1012 - DNA, 13 bp, Artificial Sequence
  Description of Artificial Sequence: Synthetic primer
gaagaagtgatga

SEQ ID NO: 1013 - DNA, 13 bp, Artificial Sequence
  Description of Artificial Sequence: Synthetic primer
tgtgtactctcat

SEQ ID NO: 1014 - DNA, 13 bp, Artificial Sequence
  Description of Artificial Sequence: Synthetic primer
gaaccagagcgtg

SEQ ID NO: 1015 - DNA, 13 bp, Artificial Sequence
  Description of Artificial Sequence: Synthetic primer
tagagttcgaagc

SEQ ID NO: 1016 - DNA, 13 bp, Artificial Sequence
  Description of Artificial Sequence: Synthetic primer
ttgttattcatga

SEQ ID NO: 1017 - DNA, 13 bp, Artificial Sequence
  Description of Artificial Sequence: Synthetic primer
tggtgagagctac

SEQ ID NO: 1018 - DNA, 13 bp, Artificial Sequence
  Description of Artificial Sequence: Synthetic primer
tggataccattag

SEQ ID NO: 1019 - DNA, 13 bp, Artificial Sequence
  Description of Artificial Sequence: Synthetic primer
aatgatacatgga

SEQ ID NO: 1020 - DNA, 13 bp, Artificial Sequence
  Description of Artificial Sequence: Synthetic primer
tgaaggcgcttgg

SEQ ID NO: 1021 - DNA, 13 bp, Artificial Sequence
  Description of Artificial Sequence: Synthetic primer
ttggatcctgtgg

SEQ ID NO: 1022 - DNA, 13 bp, Artificial Sequence
  Description of Artificial Sequence: Synthetic primer
cctggaagctggc

SEQ ID NO: 1023 - DNA, 13 bp, Artificial Sequence
  Description of Artificial Sequence: Synthetic primer
atccatggatgga

SEQ ID NO: 1024 - DNA, 13 bp, Artificial Sequence
  Description of Artificial Sequence: Synthetic primer
gatttatcattgg

SEQ ID NO: 1025 - DNA, 13 bp, Artificial Sequence
  Description of Artificial Sequence: Synthetic primer
gcagacctcagga

SEQ ID NO: 1026 - DNA, 13 bp, Artificial Sequence
  Description of Artificial Sequence: Synthetic primer
caacgggctggag

SEQ ID NO: 1027 - DNA, 13 bp, Artificial Sequence
  Description of Artificial Sequence: Synthetic primer
gtggtgataggtc

SEQ ID NO: 1028 - DNA, 13 bp, Artificial Sequence
  Description of Artificial Sequence: Synthetic primer
acagtgctaatgg

SEQ ID NO: 1029 - DNA, 13 bp, Artificial Sequence
  Description of Artificial Sequence: Synthetic primer
agatggacaaatt

SEQ ID NO: 1030 - DNA, 13 bp, Artificial Sequence
  Description of Artificial Sequence: Synthetic primer
tggattttgaact

SEQ ID NO: 1031 - DNA, 13 bp, Artificial Sequence
  Description of Artificial Sequence: Synthetic primer
agcacacaggaag

SEQ ID NO: 1032 - DNA, 13 bp, Artificial Sequence
  Description of Artificial Sequence: Synthetic primer
tggatttgggaga

SEQ ID NO: 1033 - DNA, 13 bp, Artificial Sequence
  Description of Artificial Sequence: Synthetic primer
tcttcgagcatga

SEQ ID NO: 1034 - DNA, 13 bp, Artificial Sequence
  Description of Artificial Sequence: Synthetic primer
gctatattgatgg

SEQ ID NO: 1035 - DNA, 13 bp, Artificial Sequence
  Description of Artificial Sequence: Synthetic primer
gccattgccaacc

SEQ ID NO: 1036 - DNA, 13 bp, Artificial Sequence
  Description of Artificial Sequence: Synthetic primer
gaaggggcctgga

SEQ ID NO: 1037 - DNA, 13 bp, Artificial Sequence
  Description of Artificial Sequence: Synthetic primer
ttccgggccgaca

SEQ ID NO: 1038 - DNA, 13 bp, Artificial Sequence
  Description of Artificial Sequence: Synthetic primer
atgtcaaatggga

SEQ ID NO: 1039 - DNA, 13 bp, Artificial Sequence
  Description of Artificial Sequence: Synthetic primer
gaaagccaaaaga

SEQ ID NO: 1040 - DNA, 13 bp, Artificial Sequence
  Description of Artificial Sequence: Synthetic primer
atggcaacaacgc

SEQ ID NO: 1041 - DNA, 13 bp, Artificial Sequence
  Description of Artificial Sequence: Synthetic primer
ccaccttcatcat

SEQ ID NO: 1042 - DNA, 13 bp, Artificial Sequence
  Description of Artificial Sequence: Synthetic primer
atctggacgaaag

SEQ ID NO: 1043 - DNA, 13 bp, Artificial Sequence
  Description of Artificial Sequence: Synthetic primer
ttgtgaaaccaga

SEQ ID NO: 1044 - DNA, 13 bp, Artificial Sequence
  Description of Artificial Sequence: Synthetic primer
gtgccatgccgca

SEQ ID NO: 1045 - DNA, 13 bp, Artificial Sequence
  Description of Artificial Sequence: Synthetic primer
tgagaggaaaatt

SEQ ID NO: 1046 - DNA, 13 bp, Artificial Sequence
  Description of Artificial Sequence: Synthetic primer
ttttctatcatga

SEQ ID NO: 1047 - DNA, 13 bp, Artificial Sequence
  Description of Artificial Sequence: Synthetic primer
tagagacactgct

SEQ ID NO: 1048 - DNA, 13 bp, Artificial Sequence
  Description of Artificial Sequence: Synthetic primer
acaagagaagagt

SEQ ID NO: 1049 - DNA, 13 bp, Artificial Sequence
  Description of Artificial Sequence: Synthetic primer
gtcccatgcagaa

SEQ ID NO: 1050 - DNA, 13 bp, Artificial Sequence
  Description of Artificial Sequence: Synthetic primer
catggaactcagg

SEQ ID NO: 1051 - DNA, 13 bp, Artificial Sequence
  Description of Artificial Sequence: Synthetic primer
caccaaatcccac

SEQ ID NO: 1052 - DNA, 13 bp, Artificial Sequence
  Description of Artificial Sequence: Synthetic primer
cttgagttcgaag

SEQ ID NO: 1053 - DNA, 13 bp, Artificial Sequence
  Description of Artificial Sequence: Synthetic primer
attgccatggacc

SEQ ID NO: 1054 - DNA, 13 bp, Artificial Sequence
  Description of Artificial Sequence: Synthetic primer
gtggaaatcgagg

SEQ ID NO: 1055 - DNA, 13 bp, Artificial Sequence
  Description of Artificial Sequence: Synthetic primer
tgtacagaactgg

SEQ ID NO: 1056 - DNA, 13 bp, Artificial Sequence
  Description of Artificial Sequence: Synthetic primer
taccaaaataaag

SEQ ID NO: 1057 - DNA, 13 bp, Artificial Sequence
  Description of Artificial Sequence: Synthetic primer
acaaacaatggtt

SEQ ID NO: 1058 - DNA, 13 bp, Artificial Sequence
  Description of Artificial Sequence: Synthetic primer
caacagcaggagt

SEQ ID NO: 1059 - DNA, 13 bp, Artificial Sequence
  Description of Artificial Sequence: Synthetic primer
cacctgaaatgca

SEQ ID NO: 1060 - DNA, 13 bp, Artificial Sequence
  Description of Artificial Sequence: Synthetic primer
acatgatttcaag

SEQ ID NO: 1061 - DNA, 13 bp, Artificial Sequence
  Description of Artificial Sequence: Synthetic primer
ttcagcggtgttt

SEQ ID NO: 1062 - DNA, 13 bp, Artificial Sequence
  Description of Artificial Sequence: Synthetic primer
tgacctacgttgt

SEQ ID NO: 1063 - DNA, 13 bp, Artificial Sequence
  Description of Artificial Sequence: Synthetic primer
aaggagaatggaa

SEQ ID NO: 1064 - DNA, 13 bp, Artificial Sequence
  Description of Artificial Sequence: Synthetic primer
ctaaagcatcaca

SEQ ID NO: 1065 - DNA, 13 bp, Artificial Sequence
  Description of Artificial Sequence: Synthetic primer
tcatggaattcag

SEQ ID NO: 1066 - DNA, 13 bp, Artificial Sequence
  Description of Artificial Sequence: Synthetic primer
acacaacatcaaa

SEQ ID NO: 1067 - DNA, 13 bp, Artificial Sequence
  Description of Artificial Sequence: Synthetic primer
atggagaaattga

SEQ ID NO: 1068 - DNA, 13 bp, Artificial Sequence
  Description of Artificial Sequence: Synthetic primer
taaacatgacatc

SEQ ID NO: 1069 - DNA, 13 bp, Artificial Sequence
  Description of Artificial Sequence: Synthetic primer
aatggttggaaac

SEQ ID NO: 1070 - DNA, 13 bp, Artificial Sequence
  Description of Artificial Sequence: Synthetic primer
aaaagatggggaa

SEQ ID NO: 1071 - DNA, 13 bp, Artificial Sequence
  Description of Artificial Sequence: Synthetic primer
ggctgaaaagaat

SEQ ID NO: 1072 - DNA, 13 bp, Artificial Sequence
  Description of Artificial Sequence: Synthetic primer
cagatggattgtt

SEQ ID NO: 1073 - DNA, 13 bp, Artificial Sequence
  Description of Artificial Sequence: Synthetic primer
gatctctgatgaa

SEQ ID NO: 1074 - DNA, 13 bp, Artificial Sequence
  Description of Artificial Sequence: Synthetic primer
gtcatcacagaaa

SEQ ID NO: 1075 - DNA, 13 bp, Artificial Sequence
  Description of Artificial Sequence: Synthetic primer
atagaccccagac

SEQ ID NO: 1076 - DNA, 13 bp, Artificial Sequence
  Description of Artificial Sequence: Synthetic primer
tggcgacagccat

SEQ ID NO: 1077 - DNA, 13 bp, Artificial Sequence
  Description of Artificial Sequence: Synthetic primer
gaaaagccaaaat

SEQ ID NO: 1078 - DNA, 13 bp, Artificial Sequence
  Description of Artificial Sequence: Synthetic primer
gagactctggaga

SEQ ID NO: 1079 - DNA, 13 bp, Artificial Sequence
  Description of Artificial Sequence: Synthetic primer
tgactgaggactg

SEQ ID NO: 1080 - DNA, 13 bp, Artificial Sequence
  Description of Artificial Sequence: Synthetic primer
ggaggaactacca

SEQ ID NO: 1081 - DNA, 13 bp, Artificial Sequence
  Description of Artificial Sequence: Synthetic primer
gaaggagcctgga

SEQ ID NO: 1082 - DNA, 13 bp, Artificial Sequence
  Description of Artificial Sequence: Synthetic primer
tgttaggagttgg

SEQ ID NO: 1083 - DNA, 13 bp, Artificial Sequence
  Description of Artificial Sequence: Synthetic primer
tttggtccggaaa

SEQ ID NO: 1084 - DNA, 13 bp, Artificial Sequence
  Description of Artificial Sequence: Synthetic primer
aatatgctgaaac

SEQ ID NO: 1085 - DNA, 13 bp, Artificial Sequence
  Description of Artificial Sequence: Synthetic primer
atatttaagctca

SEQ ID NO: 1086 - DNA, 13 bp, Artificial Sequence
  Description of Artificial Sequence: Synthetic primer
ggaaaggcaaaaa

SEQ ID NO: 1087 - DNA, 13 bp, Artificial Sequence
  Description of Artificial Sequence: Synthetic primer
tggaccctgtggt

SEQ ID NO: 1088 - DNA, 13 bp, Artificial Sequence
  Description of Artificial Sequence: Synthetic primer
aaagcaaagatct

SEQ ID NO: 1089 - DNA, 13 bp, Artificial Sequence
  Description of Artificial Sequence: Synthetic primer
aatcttcaccaag

SEQ ID NO: 1090 - DNA, 13 bp, Artificial Sequence
  Description of Artificial Sequence: Synthetic primer
gagctcgcttcct

SEQ ID NO: 1091 - DNA, 13 bp, Artificial Sequence
  Description of Artificial Sequence: Synthetic primer
aatgcccacaaag

SEQ ID NO: 1092 - DNA, 13 bp, Artificial Sequence
  Description of Artificial Sequence: Synthetic primer
atagagctccaga

SEQ ID NO: 1093 - DNA, 13 bp, Artificial Sequence
  Description of Artificial Sequence: Synthetic primer
ggagacaaatggg

SEQ ID NO: 1094 - DNA, 13 bp, Artificial Sequence
  Description of Artificial Sequence: Synthetic primer
ttcagtcaacatg

SEQ ID NO: 1095 - DNA, 13 bp, Artificial Sequence
  Description of Artificial Sequence: Synthetic primer
ctatggcttaatc

SEQ ID NO: 1096 - DNA, 13 bp, Artificial Sequence
  Description of Artificial Sequence: Synthetic primer
gtttctcctcttt

SEQ ID NO: 1097 - DNA, 13 bp, Artificial Sequence
  Description of Artificial Sequence: Synthetic primer
agcatttttgctt

SEQ ID NO: 1098 - DNA, 13 bp, Artificial Sequence
  Description of Artificial Sequence: Synthetic primer
ggagtggctgtca

SEQ ID NO: 1099 - DNA, 13 bp, Artificial Sequence
  Description of Artificial Sequence: Synthetic primer
tgaatctcttcat

SEQ ID NO: 1100 - DNA, 13 bp, Artificial Sequence
  Description of Artificial Sequence: Synthetic primer
tattgctctgtcc

SEQ ID NO: 1101 - DNA, 13 bp, Artificial Sequence
  Description of Artificial Sequence: Synthetic primer
tccatgggttgtg

SEQ ID NO: 1102 - DNA, 13 bp, Artificial Sequence
  Description of Artificial Sequence: Synthetic primer
ccccagcctctgt

SEQ ID NO: 1103 - DNA, 13 bp, Artificial Sequence
  Description of Artificial Sequence: Synthetic primer
ccatgttctcctc

SEQ ID NO: 1104 - DNA, 13 bp, Artificial Sequence
  Description of Artificial Sequence: Synthetic primer
tttctggttctgg

SEQ ID NO: 1105 - DNA, 13 bp, Artificial Sequence
  Description of Artificial Sequence: Synthetic primer
ccatttctgaaat

SEQ ID NO: 1106 - DNA, 13 bp, Artificial Sequence
  Description of Artificial Sequence: Synthetic primer
gttgtcatccatt

SEQ ID NO: 1107 - DNA, 13 bp, Artificial Sequence
  Description of Artificial Sequence: Synthetic primer
tttggatttctgt

SEQ ID NO: 1108 - DNA, 13 bp, Artificial Sequence
  Description of Artificial Sequence: Synthetic primer
tcgtggtgttcca

SEQ ID NO: 1109 - DNA, 13 bp, Artificial Sequence
  Description of Artificial Sequence: Synthetic primer
cccacgttttgta

SEQ ID NO: 1110 - DNA, 13 bp, Artificial Sequence
  Description of Artificial Sequence: Synthetic primer
cgtactgtggctt

SEQ ID NO: 1111 - DNA, 13 bp, Artificial Sequence
  Description of Artificial Sequence: Synthetic primer
tggtaccttattg

SEQ ID NO: 1112 - DNA, 13 bp, Artificial Sequence
  Description of Artificial Sequence: Synthetic primer
tcctagtgaaaag

SEQ ID NO: 1113 - DNA, 13 bp, Artificial Sequence
  Description of Artificial Sequence: Synthetic primer
taggcccatgttt

SEQ ID NO: 1114 - DNA, 13 bp, Artificial Sequence
  Description of Artificial Sequence: Synthetic primer
atgtaccatattg

SEQ ID NO: 1115 - DNA, 13 bp, Artificial Sequence
  Description of Artificial Sequence: Synthetic primer
tctggctctggaa

SEQ ID NO: 1116 - DNA, 13 bp, Artificial Sequence
  Description of Artificial Sequence: Synthetic primer
tggcactgacgta

SEQ ID NO: 1117 - DNA, 13 bp, Artificial Sequence
  Description of Artificial Sequence: Synthetic primer
caacttccatgtt

SEQ ID NO: 1118 - DNA, 13 bp, Artificial Sequence
  Description of Artificial Sequence: Synthetic primer
tctttttctgcca

SEQ ID NO: 1119 - DNA, 13 bp, Artificial Sequence
  Description of Artificial Sequence: Synthetic primer
ttcctctttcctg

SEQ ID NO: 1120 - DNA, 13 bp, Artificial Sequence
  Description of Artificial Sequence: Synthetic primer
tcattattccggc

SEQ ID NO: 1121 - DNA, 13 bp, Artificial Sequence
  Description of Artificial Sequence: Synthetic primer
tcatcatgggagt

SEQ ID NO: 1122 - DNA, 13 bp, Artificial Sequence
  Description of Artificial Sequence: Synthetic primer
cctgttccacatg

SEQ ID NO: 1123 - DNA, 13 bp, Artificial Sequence
  Description of Artificial Sequence: Synthetic primer
actgccttgctgt

SEQ ID NO: 1124 - DNA, 13 bp, Artificial Sequence
  Description of Artificial Sequence: Synthetic primer
ctccatatgagat

SEQ ID NO: 1125 - DNA, 13 bp, Artificial Sequence
  Description of Artificial Sequence: Synthetic primer
catgcctccagct

SEQ ID NO: 1126 - DNA, 13 bp, Artificial Sequence
  Description of Artificial Sequence: Synthetic primer
atgtctgttgtga

SEQ ID NO: 1127 - DNA, 13 bp, Artificial Sequence
  Description of Artificial Sequence: Synthetic primer
ttcctccttgttc

SEQ ID NO: 1128 - DNA, 13 bp, Artificial Sequence
  Description of Artificial Sequence: Synthetic primer
ttttctttgtcag

SEQ ID NO: 1129 - DNA, 13 bp, Artificial Sequence
  Description of Artificial Sequence: Synthetic primer
gtggagtttcgtg

SEQ ID NO: 1130 - DNA, 13 bp, Artificial Sequence
  Description of Artificial Sequence: Synthetic primer
tggatgttagtct

SEQ ID NO: 1131 - DNA, 13 bp, Artificial Sequence
  Description of Artificial Sequence: Synthetic primer
gtgtcacatttct

SEQ ID NO: 1132 - DNA, 13 bp, Artificial Sequence
  Description of Artificial Sequence: Synthetic primer
tcagctggtggaa

SEQ ID NO: 1133 - DNA, 13 bp, Artificial Sequence
  Description of Artificial Sequence: Synthetic primer
agtcccacgtgtg

SEQ ID NO: 1134 - DNA, 13 bp, Artificial Sequence
  Description of Artificial Sequence: Synthetic primer
ccatctttcatga

SEQ ID NO: 1135 - DNA, 13 bp, Artificial Sequence
  Description of Artificial Sequence: Synthetic primer
ccatgatgtcagt

SEQ ID NO: 1136 - DNA, 13 bp, Artificial Sequence
  Description of Artificial Sequence: Synthetic primer
aaccccataacca

SEQ ID NO: 1137 - DNA, 13 bp, Artificial Sequence
  Description of Artificial Sequence: Synthetic primer
tgtcacacttttc

SEQ ID NO: 1138 - DNA, 13 bp, Artificial Sequence
  Description of Artificial Sequence: Synthetic primer
cctgttctaggtg

SEQ ID NO: 1139 - DNA, 13 bp, Artificial Sequence
  Description of Artificial Sequence: Synthetic primer
taccatatggctc

SEQ ID NO: 1140 - DNA, 13 bp, Artificial Sequence
  Description of Artificial Sequence: Synthetic primer
tccaacttgccta

SEQ ID NO: 1141 - DNA, 13 bp, Artificial Sequence
  Description of Artificial Sequence: Synthetic primer
atgacatccatgt

SEQ ID NO: 1142 - DNA, 13 bp, Artificial Sequence
  Description of Artificial Sequence: Synthetic primer
tattgttctgtcc

SEQ ID NO: 1143 - DNA, 13 bp, Artificial Sequence
  Description of Artificial Sequence: Synthetic primer
catctcattgaag

SEQ ID NO: 1144 - DNA, 13 bp, Artificial Sequence
  Description of Artificial Sequence: Synthetic primer
tggtatcttattg

SEQ ID NO: 1145 - DNA, 13 bp, Artificial Sequence
  Description of Artificial Sequence: Synthetic primer
cccatcctctgtc

SEQ ID NO: 1146 - DNA, 13 bp, Artificial Sequence
  Description of Artificial Sequence: Synthetic primer
cctccagccacta

SEQ ID NO: 1147 - DNA, 13 bp, Artificial Sequence
  Description of Artificial Sequence: Synthetic primer
tctggatttctgt

SEQ ID NO: 1148 - DNA, 13 bp, Artificial Sequence
  Description of Artificial Sequence: Synthetic primer
ccatgttttccat

SEQ ID NO: 1149 - DNA, 13 bp, Artificial Sequence
  Description of Artificial Sequence: Synthetic primer
atgcagttccaaa

SEQ ID NO: 1150 - DNA, 13 bp, Artificial Sequence
  Description of Artificial Sequence: Synthetic primer
agtcttcatcatt

SEQ ID NO: 1151 - DNA, 13 bp, Artificial Sequence
  Description of Artificial Sequence: Synthetic primer
agacttttccctt

SEQ ID NO: 1152 - DNA, 13 bp, Artificial Sequence
  Description of Artificial Sequence: Synthetic primer
ccatgtcggcatg

SEQ ID NO: 1153 - DNA, 13 bp, Artificial Sequence
  Description of Artificial Sequence: Synthetic primer
atttggttgttct

SEQ ID NO: 1154 - DNA, 13 bp, Artificial Sequence
  Description of Artificial Sequence: Synthetic primer
ctcaacattggtg

SEQ ID NO: 1155 - DNA, 13 bp, Artificial Sequence
  Description of Artificial Sequence: Synthetic primer
attgacagtacca

SEQ ID NO: 1156 - DNA, 13 bp, Artificial Sequence
  Description of Artificial Sequence: Synthetic primer
gagcatgattgta

SEQ ID NO: 1157 - DNA, 13 bp, Artificial Sequence
  Description of Artificial Sequence: Synthetic primer
gtgtctttttctt

SEQ ID NO: 1158 - DNA, 13 bp, Artificial Sequence
  Description of Artificial Sequence: Synthetic primer
aagtccatctcaa

SEQ ID NO: 1159 - DNA, 13 bp, Artificial Sequence
  Description of Artificial Sequence: Synthetic primer
ggctaaatttggg

SEQ ID NO: 1160 - DNA, 13 bp, Artificial Sequence
  Description of Artificial Sequence: Synthetic primer
ccatagattgctc

SEQ ID NO: 1161 - DNA, 13 bp, Artificial Sequence
  Description of Artificial Sequence: Synthetic primer
cccacaggtacca

SEQ ID NO: 1162 - DNA, 13 bp, Artificial Sequence
  Description of Artificial Sequence: Synthetic primer
ctccactccttgt

SEQ ID NO: 1163 - DNA, 13 bp, Artificial Sequence
  Description of Artificial Sequence: Synthetic primer
cctccatatgata

SEQ ID NO: 1164 - DNA, 13 bp, Artificial Sequence
  Description of Artificial Sequence: Synthetic primer
caaaagttggtct

SEQ ID NO: 1165 - DNA, 13 bp, Artificial Sequence
  Description of Artificial Sequence: Synthetic primer
tgttagccattga

SEQ ID NO: 1166 - DNA, 13 bp, Artificial Sequence
  Description of Artificial Sequence: Synthetic primer
ttcattattccag

SEQ ID NO: 1167 - DNA, 13 bp, Artificial Sequence
  Description of Artificial Sequence: Synthetic primer
gtcatccactgat

SEQ ID NO: 1168 - DNA, 13 bp, Artificial Sequence
  Description of Artificial Sequence: Synthetic primer
ttgtgcaactcac

SEQ ID NO: 1169 - DNA, 13 bp, Artificial Sequence
  Description of Artificial Sequence: Synthetic primer
acccacgtagctc

SEQ ID NO: 1170 - DNA, 13 bp, Artificial Sequence
  Description of Artificial Sequence: Synthetic primer
cctctttcattct

SEQ ID NO: 1171 - DNA, 13 bp, Artificial Sequence
  Description of Artificial Sequence: Synthetic primer
cccagtttggttc

SEQ ID NO: 1172 - DNA, 13 bp, Artificial Sequence
  Description of Artificial Sequence: Synthetic primer
ggtgcaccatttt

SEQ ID NO: 1173 - DNA, 13 bp, Artificial Sequence
  Description of Artificial Sequence: Synthetic primer
ttttcctcattgt

SEQ ID NO: 1174 - DNA, 13 bp, Artificial Sequence
  Description of Artificial Sequence: Synthetic primer
tagcacgctatca

SEQ ID NO: 1175 - DNA, 13 bp, Artificial Sequence
  Description of Artificial Sequence: Synthetic primer
cccattgtgaagt

SEQ ID NO: 1176 - DNA, 13 bp, Artificial Sequence
  Description of Artificial Sequence: Synthetic primer
gacatccaggttt

SEQ ID NO: 1177 - DNA, 13 bp, Artificial Sequence
  Description of Artificial Sequence: Synthetic primer
ctgtccgtggtga

SEQ ID NO: 1178 - DNA, 13 bp, Artificial Sequence
  Description of Artificial Sequence: Synthetic primer
ttttgttccttcc

SEQ ID NO: 1179 - DNA, 13 bp, Artificial Sequence
  Description of Artificial Sequence: Synthetic primer
ttgttccttcaca

SEQ ID NO: 1180 - DNA, 13 bp, Artificial Sequence
  Description of Artificial Sequence: Synthetic primer
gctatctttttct

SEQ ID NO: 1181 - DNA, 13 bp, Artificial Sequence
  Description of Artificial Sequence: Synthetic primer
ccgccatgttctg

SEQ ID NO: 1182 - DNA, 13 bp, Artificial Sequence
  Description of Artificial Sequence: Synthetic primer
gtttgcttttgcc

SEQ ID NO: 1183 - DNA, 13 bp, Artificial Sequence
  Description of Artificial Sequence: Synthetic primer
gttctcgaggtct

SEQ ID NO: 1184 - DNA, 13 bp, Artificial Sequence
  Description of Artificial Sequence: Synthetic primer
gaaactccggcca

SEQ ID NO: 1185 - DNA, 13 bp, Artificial Sequence
  Description of Artificial Sequence: Synthetic primer
aatcccaaagcca

SEQ ID NO: 1186 - DNA, 13 bp, Artificial Sequence
  Description of Artificial Sequence: Synthetic primer
aataacccatatc

SEQ ID NO: 1187 - DNA, 13 bp, Artificial Sequence
  Description of Artificial Sequence: Synthetic primer
tgccaaactctcc

SEQ ID NO: 1188 - DNA, 13 bp, Artificial Sequence
  Description of Artificial Sequence: Synthetic primer
gtaaccactccat

SEQ ID NO: 1189 - DNA, 13 bp, Artificial Sequence
  Description of Artificial Sequence: Synthetic primer
gaccaggttgttc

SEQ ID NO: 1190 - DNA, 13 bp, Artificial Sequence
  Description of Artificial Sequence: Synthetic primer
tcaccactgggtt

SEQ ID NO: 1191 - DNA, 13 bp, Artificial Sequence
  Description of Artificial Sequence: Synthetic primer
ctgtcaggtgctg

SEQ ID NO: 1192 - DNA, 13 bp, Artificial Sequence
  Description of Artificial Sequence: Synthetic primer
tgctctgaggaaa

SEQ ID NO: 1193 - DNA, 13 bp, Artificial Sequence
  Description of Artificial Sequence: Synthetic primer
agcttccatgttc

SEQ ID NO: 1194 - DNA, 13 bp, Artificial Sequence
  Description of Artificial Sequence: Synthetic primer
ctgtgtattcctc

SEQ ID NO: 1195 - DNA, 13 bp, Artificial Sequence
  Description of Artificial Sequence: Synthetic primer
tctcctcttttca

SEQ ID NO: 1196 - DNA, 13 bp, Artificial Sequence
  Description of Artificial Sequence: Synthetic primer
cattggtgttatt

SEQ ID NO: 1197 - DNA, 13 bp, Artificial Sequence
  Description of Artificial Sequence: Synthetic primer
aaatggtgtgaac

SEQ ID NO: 1198 - DNA, 13 bp, Artificial Sequence
  Description of Artificial Sequence: Synthetic primer
caaaaacctggtg

SEQ ID NO: 1199 - DNA, 13 bp, Artificial Sequence
  Description of Artificial Sequence: Synthetic primer
gctgctcttttct

SEQ ID NO: 1200 - DNA, 13 bp, Artificial Sequence
  Description of Artificial Sequence: Synthetic primer
taaatctcttcat

SEQ ID NO: 1201 - DNA, 13 bp, Artificial Sequence
  Description of Artificial Sequence: Synthetic primer
atgtttgccatgg

SEQ ID NO: 1202 - DNA, 13 bp, Artificial Sequence
  Description of Artificial Sequence: Synthetic primer
gccattcccaaga

SEQ ID NO: 1203 - DNA, 13 bp, Artificial Sequence
  Description of Artificial Sequence: Synthetic primer
ctgttgtctgata

SEQ ID NO: 1204 - DNA, 13 bp, Artificial Sequence
  Description of Artificial Sequence: Synthetic primer
ctcctgaccctgc

SEQ ID NO: 1205 - DNA, 13 bp, Artificial Sequence
  Description of Artificial Sequence: Synthetic primer
tatcacacttttc

SEQ ID NO: 1206 - DNA, 13 bp, Artificial Sequence
  Description of Artificial Sequence: Synthetic primer
ccaattcgctggg

SEQ ID NO: 1207 - DNA, 13 bp, Artificial Sequence
  Description of Artificial Sequence: Synthetic primer
ttgctcctgacag

SEQ ID NO: 1208 - DNA, 13 bp, Artificial Sequence
  Description of Artificial Sequence: Synthetic primer
acccagtacatct

SEQ ID NO: 1209 - DNA, 13 bp, Artificial Sequence
  Description of Artificial Sequence: Synthetic primer
ggaaagagagata

SEQ ID NO: 1210 - DNA, 13 bp, Artificial Sequence
  Description of Artificial Sequence: Synthetic primer
ttgctctggggaa

SEQ ID NO: 1211 - DNA, 13 bp, Artificial Sequence
  Description of Artificial Sequence: Synthetic primer
ttacagaactcct

SEQ ID NO: 1212 - DNA, 13 bp, Artificial Sequence
  Description of Artificial Sequence: Synthetic primer
tcaatgctatgtc

SEQ ID NO: 1213 - DNA, 13 bp, Artificial Sequence
  Description of Artificial Sequence: Synthetic primer
cttacctaggtgc

SEQ ID NO: 1214 - DNA, 13 bp, Artificial Sequence
  Description of Artificial Sequence: Synthetic primer
ccgtactatggct

SEQ ID NO: 1215 - DNA, 13 bp, Artificial Sequence
  Description of Artificial Sequence: Synthetic primer
ccttttccaaaca

SEQ ID NO: 1216 - DNA, 13 bp, Artificial Sequence
  Description of Artificial Sequence: Synthetic primer
caattgggttgac

SEQ ID NO: 1217 - DNA, 13 bp, Artificial Sequence
  Description of Artificial Sequence: Synthetic primer
tgataccttattg

SEQ ID NO: 1218 - DNA, 13 bp, Artificial Sequence
  Description of Artificial Sequence: Synthetic primer
ttgtgcagctcac

SEQ ID NO: 1219 - DNA, 13 bp, Artificial Sequence
  Description of Artificial Sequence: Synthetic primer
tttcctgatgaca

SEQ ID NO: 1220 - DNA, 13 bp, Artificial Sequence
  Description of Artificial Sequence: Synthetic primer
ccatccttcataa

SEQ ID NO: 1221 - DNA, 13 bp, Artificial Sequence
  Description of Artificial Sequence: Synthetic primer
cctgttctgggtg

SEQ ID NO: 1222 - DNA, 13 bp, Artificial Sequence
  Description of Artificial Sequence: Synthetic primer
ccatgtcagcatg

SEQ ID NO: 1223 - DNA, 13 bp, Artificial Sequence
  Description of Artificial Sequence: Synthetic primer
tcagctcagtggg

SEQ ID NO: 1224 - DNA, 13 bp, Artificial Sequence
  Description of Artificial Sequence: Synthetic primer
tgttccaaaacct

SEQ ID NO: 1225 - DNA, 13 bp, Artificial Sequence
  Description of Artificial Sequence: Synthetic primer
gtagctcctgtca

SEQ ID NO: 1226 - DNA, 13 bp, Artificial Sequence
  Description of Artificial Sequence: Synthetic primer
ccatggtaagccc

SEQ ID NO: 1227 - DNA, 13 bp, Artificial Sequence
  Description of Artificial Sequence: Synthetic primer
catgatggttcaa

SEQ ID NO: 1228 - DNA, 13 bp, Artificial Sequence
  Description of Artificial Sequence: Synthetic primer
tctgtggaaaggc

SEQ ID NO: 1229 - DNA, 13 bp, Artificial Sequence
  Description of Artificial Sequence: Synthetic primer
acccaatacatct

SEQ ID NO: 1230 - DNA, 13 bp, Artificial Sequence
  Description of Artificial Sequence: Synthetic primer
gcagctgtccttt

SEQ ID NO: 1231 - DNA, 13 bp, Artificial Sequence
  Description of Artificial Sequence: Synthetic primer
gcactcacatatg

SEQ ID NO: 1232 - DNA, 13 bp, Artificial Sequence
  Description of Artificial Sequence: Synthetic primer
cttctgtccagtg

SEQ ID NO: 1233 - DNA, 13 bp, Artificial Sequence
  Description of Artificial Sequence: Synthetic primer
tactgttctgtcc

SEQ ID NO: 1234 - DNA, 13 bp, Artificial Sequence
  Description of Artificial Sequence: Synthetic primer
cgatttcttctgt

SEQ ID NO: 1235 - DNA, 13 bp, Artificial Sequence
  Description of Artificial Sequence: Synthetic primer
tgtgtctcagcat

SEQ ID NO: 1236 - DNA, 13 bp, Artificial Sequence
  Description of Artificial Sequence: Synthetic primer
gacatccacgttt

SEQ ID NO: 1237 - DNA, 13 bp, Artificial Sequence
  Description of Artificial Sequence: Synthetic primer
tcttaaacaagag

SEQ ID NO: 1238 - DNA, 13 bp, Artificial Sequence
  Description of Artificial Sequence: Synthetic primer
tgaagatcatcct

SEQ ID NO: 1239 - DNA, 13 bp, Artificial Sequence
  Description of Artificial Sequence: Synthetic primer
atgatatcatgtc

SEQ ID NO: 1240 - DNA, 13 bp, Artificial Sequence
  Description of Artificial Sequence: Synthetic primer
gctggatgctttt

SEQ ID NO: 1241 - DNA, 13 bp, Artificial Sequence
  Description of Artificial Sequence: Synthetic primer
gaatgagtgtgac

SEQ ID NO: 1242 - DNA, 13 bp, Artificial Sequence
  Description of Artificial Sequence: Synthetic primer
ccatttcagatat

SEQ ID NO: 1243 - DNA, 13 bp, Artificial Sequence
  Description of Artificial Sequence: Synthetic primer
cctcctgccacca

SEQ ID NO: 1244 - DNA, 13 bp, Artificial Sequence
  Description of Artificial Sequence: Synthetic primer
tttctgttgtgtg

SEQ ID NO: 1245 - DNA, 13 bp, Artificial Sequence
  Description of Artificial Sequence: Synthetic primer
cctccatgttcta

SEQ ID NO: 1246 - DNA, 13 bp, Artificial Sequence
  Description of Artificial Sequence: Synthetic primer
ttccatgaatatt

SEQ ID NO: 1247 - DNA, 13 bp, Artificial Sequence
  Description of Artificial Sequence: Synthetic primer
aggttctgtatgg

SEQ ID NO: 1248 - DNA, 13 bp, Artificial Sequence
  Description of Artificial Sequence: Synthetic primer
gttttcacttgcc

SEQ ID NO: 1249 - DNA, 13 bp, Artificial Sequence
  Description of Artificial Sequence: Synthetic primer
ctgttgttccggg

SEQ ID NO: 1250 - DNA, 13 bp, Artificial Sequence
  Description of Artificial Sequence: Synthetic primer
cttctgtggctcc

SEQ ID NO: 1251 - DNA, 13 bp, Artificial Sequence
  Description of Artificial Sequence: Synthetic primer
tgggtttgtagaa

SEQ ID NO: 1252 - DNA, 13 bp, Artificial Sequence
  Description of Artificial Sequence: Synthetic primer
taacggattggca

SEQ ID NO: 1253 - DNA, 13 bp, Artificial Sequence
  Description of Artificial Sequence: Synthetic primer
tgtatcttttcat

SEQ ID NO: 1254 - DNA, 13 bp, Artificial Sequence
  Description of Artificial Sequence: Synthetic primer
actccatttccat

SEQ ID NO: 1255 - DNA, 13 bp, Artificial Sequence
  Description of Artificial Sequence: Synthetic primer
ccattgacactgc

SEQ ID NO: 1256 - DNA, 13 bp, Artificial Sequence
  Description of Artificial Sequence: Synthetic primer
gtgtgatgactcc

SEQ ID NO: 1257 - DNA, 13 bp, Artificial Sequence
  Description of Artificial Sequence: Synthetic primer
ttgaccatgttgt

SEQ ID NO: 1258 - DNA, 13 bp, Artificial Sequence
  Description of Artificial Sequence: Synthetic primer
atcctggtgacat

SEQ ID NO: 1259 - DNA, 13 bp, Artificial Sequence
  Description of Artificial Sequence: Synthetic primer
attctgggttttt

SEQ ID NO: 1260 - DNA, 13 bp, Artificial Sequence
  Description of Artificial Sequence: Synthetic primer
acagtctgggatt

SEQ ID NO: 1261 - DNA, 13 bp, Artificial Sequence
  Description of Artificial Sequence: Synthetic primer
agagtagtccagc

SEQ ID NO: 1262 - DNA, 13 bp, Artificial Sequence
  Description of Artificial Sequence: Synthetic primer
gcctttcctatag

SEQ ID NO: 1263 - DNA, 13 bp, Artificial Sequence
  Description of Artificial Sequence: Synthetic primer
cccatagaaaaag

SEQ ID NO: 1264 - DNA, 13 bp, Artificial Sequence
  Description of Artificial Sequence: Synthetic primer
catgcttgatttt

SEQ ID NO: 1265 - DNA, 13 bp, Artificial Sequence
  Description of Artificial Sequence: Synthetic primer
acattggtctcat

SEQ ID NO: 1266 - DNA, 13 bp, Artificial Sequence
  Description of Artificial Sequence: Synthetic primer
cctagttctttcc

SEQ ID NO: 1267 - DNA, 13 bp, Artificial Sequence
  Description of Artificial Sequence: Synthetic primer
tctcagccaaagg

SEQ ID NO: 1268 - DNA, 13 bp, Artificial Sequence
  Description of Artificial Sequence: Synthetic primer
gccatctgttccg

SEQ ID NO: 1269 - DNA, 13 bp, Artificial Sequence
  Description of Artificial Sequence: Synthetic primer
catagccattgtc

SEQ ID NO: 1270 - DNA, 13 bp, Artificial Sequence
  Description of Artificial Sequence: Synthetic primer
catctcattaaag

SEQ ID NO: 1271 - DNA, 13 bp, Artificial Sequence
  Description of Artificial Sequence: Synthetic primer
gggtatcacattt

SEQ ID NO: 1272 - DNA, 13 bp, Artificial Sequence
  Description of Artificial Sequence: Synthetic primer
attgttgtcgttc

SEQ ID NO: 1273 - DNA, 13 bp, Artificial Sequence
  Description of Artificial Sequence: Synthetic primer
ccgtgattggtat

SEQ ID NO: 1274 - DNA, 13 bp, Artificial Sequence
  Description of Artificial Sequence: Synthetic primer
aaaagattccctc

SEQ ID NO: 1275 - DNA, 13 bp, Artificial Sequence
  Description of Artificial Sequence: Synthetic primer
gtctataggcttt

SEQ ID NO: 1276 - DNA, 13 bp, Artificial Sequence
  Description of Artificial Sequence: Synthetic primer
cccatgtcggcgt

SEQ ID NO: 1277 - DNA, 13 bp, Artificial Sequence
  Description of Artificial Sequence: Synthetic primer
tgtcacacttctc

SEQ ID NO: 1278 - DNA, 13 bp, Artificial Sequence
  Description of Artificial Sequence: Synthetic primer
ctgtgatcagtct

SEQ ID NO: 1279 - DNA, 13 bp, Artificial Sequence
  Description of Artificial Sequence: Synthetic primer
cagccgtatgcag

SEQ ID NO: 1280 - DNA, 13 bp, Artificial Sequence
  Description of Artificial Sequence: Synthetic primer
acataacatgcta

SEQ ID NO: 1281 - DNA, 13 bp, Artificial Sequence
  Description of Artificial Sequence: Synthetic primer
gacatccatgttt

SEQ ID NO: 1282 - DNA, 13 bp, Artificial Sequence
  Description of Artificial Sequence: Synthetic primer
actccattgccat

SEQ ID NO: 1283 - DNA, 13 bp, Artificial Sequence
  Description of Artificial Sequence: Synthetic primer
cttacctagatgc

SEQ ID NO: 1284 - DNA, 13 bp, Artificial Sequence
  Description of Artificial Sequence: Synthetic primer
ccatttcggagat

SEQ ID NO: 1285 - DNA, 13 bp, Artificial Sequence
  Description of Artificial Sequence: Synthetic primer
ttggctgttatca

SEQ ID NO: 1286 - DNA, 13 bp, Artificial Sequence
  Description of Artificial Sequence: Synthetic primer
ccccagcctctat

SEQ ID NO: 1287 - DNA, 13 bp, Artificial Sequence
  Description of Artificial Sequence: Synthetic primer
gttcctctcgaca

SEQ ID NO: 1288 - DNA, 13 bp, Artificial Sequence
  Description of Artificial Sequence: Synthetic primer
tcctctaaaattt

SEQ ID NO: 1289 - DNA, 13 bp, Artificial Sequence
  Description of Artificial Sequence: Synthetic primer
ttcttcacttccc

SEQ ID NO: 1290 - DNA, 13 bp, Artificial Sequence
  Description of Artificial Sequence: Synthetic primer
cacttcccctgac

SEQ ID NO: 1291 - DNA, 13 bp, Artificial Sequence
  Description of Artificial Sequence: Synthetic primer
ccaagaatggctg

SEQ ID NO: 1292 - DNA, 13 bp, Artificial Sequence
  Description of Artificial Sequence: Synthetic primer
attgctcggcttc

SEQ ID NO: 1293 - DNA, 13 bp, Artificial Sequence
  Description of Artificial Sequence: Synthetic primer
gtcgtcatccatt

SEQ ID NO: 1294 - DNA, 13 bp, Artificial Sequence
  Description of Artificial Sequence: Synthetic primer
tggtttgttacca

SEQ ID NO: 1295 - DNA, 13 bp, Artificial Sequence
  Description of Artificial Sequence: Synthetic primer
acttccacatttt

SEQ ID NO: 1296 - DNA, 13 bp, Artificial Sequence
  Description of Artificial Sequence: Synthetic primer
ttttgacactggc

SEQ ID NO: 1297 - DNA, 13 bp, Artificial Sequence
  Description of Artificial Sequence: Synthetic primer
ggcctaatcattt

SEQ ID NO: 1298 - DNA, 13 bp, Artificial Sequence
  Description of Artificial Sequence: Synthetic primer
cggctctgttgtc

SEQ ID NO: 1299 - DNA, 13 bp, Artificial Sequence
  Description of Artificial Sequence: Synthetic primer
gggtggctgttct

SEQ ID NO: 1300 - DNA, 13 bp, Artificial Sequence
  Description of Artificial Sequence: Synthetic primer
gcctttgacagca

SEQ ID NO: 1301 - DNA, 13 bp, Artificial Sequence
  Description of Artificial Sequence: Synthetic primer
caaaaatctggtg

SEQ ID NO: 1302 - DNA, 13 bp, Artificial Sequence
  Description of Artificial Sequence: Synthetic primer
caaattcttggtt

SEQ ID NO: 1303 - DNA, 13 bp, Artificial Sequence
  Description of Artificial Sequence: Synthetic primer
aacagaaggcttt

SEQ ID NO: 1304 - DNA, 13 bp, Artificial Sequence
  Description of Artificial Sequence: Synthetic primer
aagtggtgggagc

SEQ ID NO: 1305 - DNA, 13 bp, Artificial Sequence
  Description of Artificial Sequence: Synthetic primer
agcagcaccatca

SEQ ID NO: 1306 - DNA, 13 bp, Artificial Sequence
  Description of Artificial Sequence: Synthetic primer
tatgggtggtctt

SEQ ID NO: 1307 - DNA, 13 bp, Artificial Sequence
  Description of Artificial Sequence: Synthetic primer
agtacatttcatg

SEQ ID NO: 1308 - DNA, 13 bp, Artificial Sequence
  Description of Artificial Sequence: Synthetic primer
accacgaaatccc

SEQ ID NO: 1309 - DNA, 13 bp, Artificial Sequence
  Description of Artificial Sequence: Synthetic primer
gcgggtatggagt

SEQ ID NO: 1310 - DNA, 13 bp, Artificial Sequence
  Description of Artificial Sequence: Synthetic primer
ctgtaatcaggcg

SEQ ID NO: 1311 - DNA, 13 bp, Artificial Sequence
  Description of Artificial Sequence: Synthetic primer
caaaatccagttc

SEQ ID NO: 1312 - DNA, 13 bp, Artificial Sequence
  Description of Artificial Sequence: Synthetic primer
gcttctgtccaat

SEQ ID NO: 1313 - DNA, 13 bp, Artificial Sequence
  Description of Artificial Sequence: Synthetic primer
tctgacgtgtgca

SEQ ID NO: 1314 - DNA, 13 bp, Artificial Sequence
  Description of Artificial Sequence: Synthetic primer
tgcaaaggttggt

SEQ ID NO: 1315 - DNA, 13 bp, Artificial Sequence
  Description of Artificial Sequence: Synthetic primer
ttatctaggagca

SEQ ID NO: 1316 - DNA, 13 bp, Artificial Sequence
  Description of Artificial Sequence: Synthetic primer
ctctgggggaagg

SEQ ID NO: 1317 - DNA, 13 bp, Artificial Sequence
  Description of Artificial Sequence: Synthetic primer
taagcaacaccat

SEQ ID NO: 1318 - DNA, 13 bp, Artificial Sequence
  Description of Artificial Sequence: Synthetic primer
tctgaaggtcatc

SEQ ID NO: 1319 - DNA, 13 bp, Artificial Sequence
  Description of Artificial Sequence: Synthetic primer
tggtattccagaa

SEQ ID NO: 1320 - DNA, 13 bp, Artificial Sequence
  Description of Artificial Sequence: Synthetic primer
ccagtcccatgcc

SEQ ID NO: 1321 - DNA, 13 bp, Artificial Sequence
  Description of Artificial Sequence: Synthetic primer
ttccaaataatcc

SEQ ID NO: 1322 - DNA, 13 bp, Artificial Sequence
  Description of Artificial Sequence: Synthetic primer
ccccaacctctgt

SEQ ID NO: 1323 - DNA, 13 bp, Artificial Sequence
  Description of Artificial Sequence: Synthetic primer
tcatttcattgaa

SEQ ID NO: 1324 - DNA, 13 bp, Artificial Sequence
  Description of Artificial Sequence: Synthetic primer
cccagggttctcc

SEQ ID NO: 1325 - DNA, 13 bp, Artificial Sequence
  Description of Artificial Sequence: Synthetic primer
ttttcttccagta

SEQ ID NO: 1326 - DNA, 13 bp, Artificial Sequence
  Description of Artificial Sequence: Synthetic primer
aagtggtgtgaac

SEQ ID NO: 1327 - DNA, 13 bp, Artificial Sequence
  Description of Artificial Sequence: Synthetic primer
tctgtggctcctg

SEQ ID NO: 1328 - DNA, 13 bp, Artificial Sequence
  Description of Artificial Sequence: Synthetic primer
cagccgtgtgcag

SEQ ID NO: 1329 - DNA, 13 bp, Artificial Sequence
  Description of Artificial Sequence: Synthetic primer
aatagttgaagtc

SEQ ID NO: 1330 - DNA, 13 bp, Artificial Sequence
  Description of Artificial Sequence: Synthetic primer
ctcagcaaaaggg

SEQ ID NO: 1331 - DNA, 13 bp, Artificial Sequence
  Description of Artificial Sequence: Synthetic primer
tgtcacatttttc

SEQ ID NO: 1332 - DNA, 13 bp, Artificial Sequence
  Description of Artificial Sequence: Synthetic primer
aaaagattccttc

SEQ ID NO: 1333 - DNA, 13 bp, Artificial Sequence
  Description of Artificial Sequence: Synthetic primer
gtcaggcacaaca

SEQ ID NO: 1334 - DNA, 13 bp, Artificial Sequence
  Description of Artificial Sequence: Synthetic primer
aaacagctatcgt

SEQ ID NO: 1335 - DNA, 13 bp, Artificial Sequence
  Description of Artificial Sequence: Synthetic primer
tgtgttatttctc

SEQ ID NO: 1336 - DNA, 13 bp, Artificial Sequence
  Description of Artificial Sequence: Synthetic primer
cagtgagcacgta

SEQ ID NO: 1337 - DNA, 13 bp, Artificial Sequence
  Description of Artificial Sequence: Synthetic primer
ctcatatgatcca

SEQ ID NO: 1338 - DNA, 13 bp, Artificial Sequence
  Description of Artificial Sequence: Synthetic primer
agtcccaatcatt

SEQ ID NO: 1339 - DNA, 13 bp, Artificial Sequence
  Description of Artificial Sequence: Synthetic primer
tactgctctgtcc

SEQ ID NO: 1340 - DNA, 13 bp, Artificial Sequence
  Description of Artificial Sequence: Synthetic primer
cacaagacaccca

SEQ ID NO: 1341 - DNA, 13 bp, Artificial Sequence
  Description of Artificial Sequence: Synthetic primer
gtcagctttctca

SEQ ID NO: 1342 - DNA, 13 bp, Artificial Sequence
  Description of Artificial Sequence: Synthetic primer
tccatgttttctt

SEQ ID NO: 1343 - DNA, 13 bp, Artificial Sequence
  Description of Artificial Sequence: Synthetic primer
catcatgggggtg

SEQ ID NO: 1344 - DNA, 13 bp, Artificial Sequence
  Description of Artificial Sequence: Synthetic primer
catatgcggttcc

SEQ ID NO: 1345 - DNA, 13 bp, Artificial Sequence
  Description of Artificial Sequence: Synthetic primer
acagaagactttt

SEQ ID NO: 1346 - DNA, 13 bp, Artificial Sequence
  Description of Artificial Sequence: Synthetic primer
tgaatcttttcat

SEQ ID NO: 1347 - DNA, 13 bp, Artificial Sequence
  Description of Artificial Sequence: Synthetic primer
tgcccatgtccgg

SEQ ID NO: 1348 - DNA, 13 bp, Artificial Sequence
  Description of Artificial Sequence: Synthetic primer
gcctcgcgacaca

SEQ ID NO: 1349 - DNA, 13 bp, Artificial Sequence
  Description of Artificial Sequence: Synthetic primer
acagcctttccca

SEQ ID NO: 1350 - DNA, 13 bp, Artificial Sequence
  Description of Artificial Sequence: Synthetic primer
caacttcttctgt

SEQ ID NO: 1351 - DNA, 13 bp, Artificial Sequence
  Description of Artificial Sequence: Synthetic primer
tgttccagaacct

SEQ ID NO: 1352 - DNA, 13 bp, Artificial Sequence
  Description of Artificial Sequence: Synthetic primer
tgccttttgcttt

SEQ ID NO: 1353 - DNA, 13 bp, Artificial Sequence
  Description of Artificial Sequence: Synthetic primer
tattgtggtgttc

SEQ ID NO: 1354 - DNA, 13 bp, Artificial Sequence
  Description of Artificial Sequence: Synthetic primer
ttccatgagtatt

SEQ ID NO: 1355 - DNA, 13 bp, Artificial Sequence
  Description of Artificial Sequence: Synthetic primer
gctgtgtaagcac

SEQ ID NO: 1356 - DNA, 13 bp, Artificial Sequence
  Description of Artificial Sequence: Synthetic primer
ctcagcattggtg

SEQ ID NO: 1357 - DNA, 13 bp, Artificial Sequence
  Description of Artificial Sequence: Synthetic primer
tgcaggtcatctt

SEQ ID NO: 1358 - DNA, 13 bp, Artificial Sequence
  Description of Artificial Sequence: Synthetic primer
gatatcttattgg

SEQ ID NO: 1359 - DNA, 13 bp, Artificial Sequence
  Description of Artificial Sequence: Synthetic primer
cctcctgagtttt

SEQ ID NO: 1360 - DNA, 13 bp, Artificial Sequence
  Description of Artificial Sequence: Synthetic primer
gtcatccactggt

SEQ ID NO: 1361 - DNA, 13 bp, Artificial Sequence
  Description of Artificial Sequence: Synthetic primer
tgttacgattggg

SEQ ID NO: 1362 - DNA, 13 bp, Artificial Sequence
  Description of Artificial Sequence: Synthetic primer
gacttttcttctt

SEQ ID NO: 1363 - DNA, 13 bp, Artificial Sequence
  Description of Artificial Sequence: Synthetic primer
tggcactaacgta

SEQ ID NO: 1364 - DNA, 13 bp, Artificial Sequence
  Description of Artificial Sequence: Synthetic primer
gggattttcctct

SEQ ID NO: 1365 - DNA, 13 bp, Artificial Sequence
  Description of Artificial Sequence: Synthetic primer
ctccgtatgaaat

SEQ ID NO: 1366 - DNA, 13 bp, Artificial Sequence
  Description of Artificial Sequence: Synthetic primer
catctgttctgtg

SEQ ID NO: 1367 - DNA, 13 bp, Artificial Sequence
  Description of Artificial Sequence: Synthetic primer
agcaccacgtcaa

SEQ ID NO: 1368 - DNA, 13 bp, Artificial Sequence
  Description of Artificial Sequence: Synthetic primer
ttgaagtgagttt

SEQ ID NO: 1369 - DNA, 13 bp, Artificial Sequence
  Description of Artificial Sequence: Synthetic primer
cccatatcagcat

SEQ ID NO: 1370 - DNA, 13 bp, Artificial Sequence
  Description of Artificial Sequence: Synthetic primer
aaaacgtcaactc

SEQ ID NO: 1371 - DNA, 13 bp, Artificial Sequence
  Description of Artificial Sequence: Synthetic primer
ggagagcactcca

SEQ ID NO: 1372 - DNA, 13 bp, Artificial Sequence
  Description of Artificial Sequence: Synthetic primer
tggccattgtctt

SEQ ID NO: 1373 - DNA, 13 bp, Artificial Sequence
  Description of Artificial Sequence: Synthetic primer
attttagcctcat

SEQ ID NO: 1374 - DNA, 13 bp, Artificial Sequence
  Description of Artificial Sequence: Synthetic primer
tgccccaccctct

SEQ ID NO: 1375 - DNA, 13 bp, Artificial Sequence
  Description of Artificial Sequence: Synthetic primer
gtcgctggtattg

SEQ ID NO: 1376 - DNA, 13 bp, Artificial Sequence
  Description of Artificial Sequence: Synthetic primer
ggttagctgttat

SEQ ID NO: 1377 - DNA, 13 bp, Artificial Sequence
  Description of Artificial Sequence: Synthetic primer
gctggggtttggt

SEQ ID NO: 1378 - DNA, 13 bp, Artificial Sequence
  Description of Artificial Sequence: Synthetic primer
tatccagtacatt

SEQ ID NO: 1379 - DNA, 13 bp, Artificial Sequence
  Description of Artificial Sequence: Synthetic primer
cacctggttgttc

SEQ ID NO: 1380 - DNA, 13 bp, Artificial Sequence
  Description of Artificial Sequence: Synthetic primer
gaccctctggaca

SEQ ID NO: 1381 - DNA, 13 bp, Artificial Sequence
  Description of Artificial Sequence: Synthetic primer
ttctttcaaccct

SEQ ID NO: 1382 - DNA, 13 bp, Artificial Sequence
  Description of Artificial Sequence: Synthetic primer
attcctaatgaaa

SEQ ID NO: 1383 - DNA, 13 bp, Artificial Sequence
  Description of Artificial Sequence: Synthetic primer
catagccgttgtt

SEQ ID NO: 1384 - DNA, 13 bp, Artificial Sequence
  Description of Artificial Sequence: Synthetic primer
attccggacctgg

SEQ ID NO: 1385 - DNA, 13 bp, Artificial Sequence
  Description of Artificial Sequence: Synthetic primer
gatcttcatcatt

SEQ ID NO: 1386 - DNA, 13 bp, Artificial Sequence
  Description of Artificial Sequence: Synthetic primer
tctgtgactgtca

SEQ ID NO: 1387 - DNA, 13 bp, Artificial Sequence
  Description of Artificial Sequence: Synthetic primer
tggtaccttcaca

SEQ ID NO: 1388 - DNA, 13 bp, Artificial Sequence
  Description of Artificial Sequence: Synthetic primer
acctcttcattga

SEQ ID NO: 1389 - DNA, 13 bp, Artificial Sequence
  Description of Artificial Sequence: Synthetic primer
cggacaccactgc

SEQ ID NO: 1390 - DNA, 13 bp, Artificial Sequence
  Description of Artificial Sequence: Synthetic primer
ttgaaggccctgc

SEQ ID NO: 1391 - DNA, 13 bp, Artificial Sequence
  Description of Artificial Sequence: Synthetic primer
cccagctgatctc

SEQ ID NO: 1392 - DNA, 13 bp, Artificial Sequence
  Description of Artificial Sequence: Synthetic primer
acacacggtctac

SEQ ID NO: 1393 - DNA, 13 bp, Artificial Sequence
  Description of Artificial Sequence: Synthetic primer
atttgtgatcaaa

SEQ ID NO: 1394 - DNA, 13 bp, Artificial Sequence
  Description of Artificial Sequence: Synthetic primer
acaaccccgttca

SEQ ID NO: 1395 - DNA, 13 bp, Artificial Sequence
  Description of Artificial Sequence: Synthetic primer
actctcaggcacc

SEQ ID NO: 1396 - DNA, 13 bp, Artificial Sequence
  Description of Artificial Sequence: Synthetic primer
aagctcagaggac

SEQ ID NO: 1397 - DNA, 13 bp, Artificial Sequence
  Description of Artificial Sequence: Synthetic primer
agatcatagatgc

SEQ ID NO: 1398 - DNA, 13 bp, Artificial Sequence
  Description of Artificial Sequence: Synthetic primer
acgatgaagagtg

SEQ ID NO: 1399 - DNA, 13 bp, Artificial Sequence
  Description of Artificial Sequence: Synthetic primer
atcttcgacaaca

SEQ ID NO: 1400 - DNA, 13 bp, Artificial Sequence
  Description of Artificial Sequence: Synthetic primer
catgccgtcacag

SEQ ID NO: 1401 - DNA, 13 bp, Artificial Sequence
  Description of Artificial Sequence: Synthetic primer
taaccagaaaagg

SEQ ID NO: 1402 - DNA, 13 bp, Artificial Sequence
  Description of Artificial Sequence: Synthetic primer
caggcggtgtaca

SEQ ID NO: 1403 - DNA, 13 bp, Artificial Sequence
  Description of Artificial Sequence: Synthetic primer
gggcaggtgggta

SEQ ID NO: 1404 - DNA, 13 bp, Artificial Sequence
  Description of Artificial Sequence: Synthetic primer
tcggtgcccacac

SEQ ID NO: 1405 - DNA, 13 bp, Artificial Sequence
  Description of Artificial Sequence: Synthetic primer
tgcaccctgacag

SEQ ID NO: 1406 - DNA, 13 bp, Artificial Sequence
  Description of Artificial Sequence: Synthetic primer
tgatagaggctgc

SEQ ID NO: 1407 - DNA, 13 bp, Artificial Sequence
  Description of Artificial Sequence: Synthetic primer
caccgacgtgatg

SEQ ID NO: 1408 - DNA, 13 bp, Artificial Sequence
  Description of Artificial Sequence: Synthetic primer
acaaagtaatgaa

SEQ ID NO: 1409 - DNA, 13 bp, Artificial Sequence
  Description of Artificial Sequence: Synthetic primer
gtcgaagcgtacg

SEQ ID NO: 1410 - DNA, 13 bp, Artificial Sequence
  Description of Artificial Sequence: Synthetic primer
cccgagagactcg

SEQ ID NO: 1411 - DNA, 13 bp, Artificial Sequence
  Description of Artificial Sequence: Synthetic primer
tgatcagagcata

SEQ ID NO: 1412 - DNA, 13 bp, Artificial Sequence
  Description of Artificial Sequence: Synthetic primer
agaaggaagaagc

SEQ ID NO: 1413 - DNA, 13 bp, Artificial Sequence
  Description of Artificial Sequence: Synthetic primer
atgtgcatgtgtg

SEQ ID NO: 1414 - DNA, 13 bp, Artificial Sequence
  Description of Artificial Sequence: Synthetic primer
acagctgtaaggt

SEQ ID NO: 1415 - DNA, 13 bp, Artificial Sequence
  Description of Artificial Sequence: Synthetic primer
gggtatatcagtt

SEQ ID NO: 1416 - DNA, 13 bp, Artificial Sequence
  Description of Artificial Sequence: Synthetic primer
gacgggtcggaga

SEQ ID NO: 1417 - DNA, 13 bp, Artificial Sequence
  Description of Artificial Sequence: Synthetic primer
atgggagaagaac

SEQ ID NO: 1418 - DNA, 13 bp, Artificial Sequence
  Description of Artificial Sequence: Synthetic primer
actgcctactaag

SEQ ID NO: 1419 - DNA, 13 bp, Artificial Sequence
  Description of Artificial Sequence: Synthetic primer
cgaccgcagcacg

SEQ ID NO: 1420 - DNA, 13 bp, Artificial Sequence
  Description of Artificial Sequence: Synthetic primer
actgggaagaatt

SEQ ID NO: 1421 - DNA, 13 bp, Artificial Sequence
  Description of Artificial Sequence: Synthetic primer
gctgcctatcgag

SEQ ID NO: 1422 - DNA, 13 bp, Artificial Sequence
  Description of Artificial Sequence: Synthetic primer
tgattaataactg

SEQ ID NO: 1423 - DNA, 13 bp, Artificial Sequence
  Description of Artificial Sequence: Synthetic primer
catcggtgttcca

SEQ ID NO: 1424 - DNA, 13 bp, Artificial Sequence
  Description of Artificial Sequence: Synthetic primer
attaaatatgcag

SEQ ID NO: 1425 - DNA, 13 bp, Artificial Sequence
  Description of Artificial Sequence: Synthetic primer
ttgcggccgtgtc

SEQ ID NO: 1426 - DNA, 13 bp, Artificial Sequence
  Description of Artificial Sequence: Synthetic primer
caggcagcacagg

SEQ ID NO: 1427 - DNA, 13 bp, Artificial Sequence
  Description of Artificial Sequence: Synthetic primer
agaaacagcggag

SEQ ID NO: 1428 - DNA, 13 bp, Artificial Sequence
  Description of Artificial Sequence: Synthetic primer
gaataaagacgga

SEQ ID NO: 1429 - DNA, 13 bp, Artificial Sequence
  Description of Artificial Sequence: Synthetic primer
aagccaacgtttg

SEQ ID NO: 1430 - DNA, 13 bp, Artificial Sequence
  Description of Artificial Sequence: Synthetic primer
gcatcatctcccc

SEQ ID NO: 1431 - DNA, 13 bp, Artificial Sequence
  Description of Artificial Sequence: Synthetic primer
cagagactaaaga

SEQ ID NO: 1432 - DNA, 13 bp, Artificial Sequence
  Description of Artificial Sequence: Synthetic primer
gacaacgtcatga

SEQ ID NO: 1433 - DNA, 13 bp, Artificial Sequence
  Description of Artificial Sequence: Synthetic primer
agagctggttagg

SEQ ID NO: 1434 - DNA, 13 bp, Artificial Sequence
  Description of Artificial Sequence: Synthetic primer
cacgtcactgacg

SEQ ID NO: 1435 - DNA, 13 bp, Artificial Sequence
  Description of Artificial Sequence: Synthetic primer
aataggcctggag

SEQ ID NO: 1436 - DNA, 13 bp, Artificial Sequence
  Description of Artificial Sequence: Synthetic primer
aagatgttcggat

SEQ ID NO: 1437 - DNA, 13 bp, Artificial Sequence
  Description of Artificial Sequence: Synthetic primer
gttaggagattga

SEQ ID NO: 1438 - DNA, 13 bp, Artificial Sequence
  Description of Artificial Sequence: Synthetic primer
cttgcgcatgctt

SEQ ID NO: 1439 - DNA, 13 bp, Artificial Sequence
  Description of Artificial Sequence: Synthetic primer
atgaaagcaacaa

SEQ ID NO: 1440 - DNA, 13 bp, Artificial Sequence
  Description of Artificial Sequence: Synthetic primer
agtttgatctaag

SEQ ID NO: 1441 - DNA, 13 bp, Artificial Sequence
  Description of Artificial Sequence: Synthetic primer
gccgttatgccat

SEQ ID NO: 1442 - DNA, 13 bp, Artificial Sequence
  Description of Artificial Sequence: Synthetic primer
acaggcggcacag

SEQ ID NO: 1443 - DNA, 13 bp, Artificial Sequence
  Description of Artificial Sequence: Synthetic primer
agcagagtgcaag

SEQ ID NO: 1444 - DNA, 13 bp, Artificial Sequence
  Description of Artificial Sequence: Synthetic primer
ataacgactgaga

SEQ ID NO: 1445 - DNA, 13 bp, Artificial Sequence
  Description of Artificial Sequence: Synthetic primer
catgtgctcctgg

SEQ ID NO: 1446 - DNA, 13 bp, Artificial Sequence
  Description of Artificial Sequence: Synthetic primer
aggtatgaagtgc

SEQ ID NO: 1447 - DNA, 13 bp, Artificial Sequence
  Description of Artificial Sequence: Synthetic primer
agccacgattgga

SEQ ID NO: 1448 - DNA, 13 bp, Artificial Sequence
  Description of Artificial Sequence: Synthetic primer
acacgttccagaa

SEQ ID NO: 1449 - DNA, 13 bp, Artificial Sequence
  Description of Artificial Sequence: Synthetic primer
cacgaggagtggg

SEQ ID NO: 1450 - DNA, 13 bp, Artificial Sequence
  Description of Artificial Sequence: Synthetic primer
aagaccctgagag

SEQ ID NO: 1451 - DNA, 13 bp, Artificial Sequence
  Description of Artificial Sequence: Synthetic primer
tttcggctgtgtc

SEQ ID NO: 1452 - DNA, 13 bp, Artificial Sequence
  Description of Artificial Sequence: Synthetic primer
tgatcagggcata

SEQ ID NO: 1453 - DNA, 13 bp, Artificial Sequence
  Description of Artificial Sequence: Synthetic primer
ccgtaagcttctt

SEQ ID NO: 1454 - DNA, 13 bp, Artificial Sequence
  Description of Artificial Sequence: Synthetic primer
cttgaccgggcga

SEQ ID NO: 1455 - DNA, 13 bp, Artificial Sequence
  Description of Artificial Sequence: Synthetic primer
gtacgcggtcgaa

SEQ ID NO: 1456 - DNA, 13 bp, Artificial Sequence
  Description of Artificial Sequence: Synthetic primer
gaggaggcagccg

SEQ ID NO: 1457 - DNA, 13 bp, Artificial Sequence
  Description of Artificial Sequence: Synthetic primer
agctagcaagaaa

SEQ ID NO: 1458 - DNA, 13 bp, Artificial Sequence
  Description of Artificial Sequence: Synthetic primer
cacctgtgatagg

SEQ ID NO: 1459 - DNA, 13 bp, Artificial Sequence
  Description of Artificial Sequence: Synthetic primer
gagatacgcgata

SEQ ID NO: 1460 - DNA, 13 bp, Artificial Sequence
  Description of Artificial Sequence: Synthetic primer
agtcactaatcac

SEQ ID NO: 1461 - DNA, 13 bp, Artificial Sequence
  Description of Artificial Sequence: Synthetic primer
cacagagagttgg

SEQ ID NO: 1462 - DNA, 13 bp, Artificial Sequence
  Description of Artificial Sequence: Synthetic primer
ggcgcagatgcat

SEQ ID NO: 1463 - DNA, 13 bp, Artificial Sequence
  Description of Artificial Sequence: Synthetic primer
gtgactagactag

SEQ ID NO: 1464 - DNA, 13 bp, Artificial Sequence
  Description of Artificial Sequence: Synthetic primer
tggtgggggataa

SEQ ID NO: 1465 - DNA, 13 bp, Artificial Sequence
  Description of Artificial Sequence: Synthetic primer
tgggctaagagct

SEQ ID NO: 1466 - DNA, 13 bp, Artificial Sequence
  Description of Artificial Sequence: Synthetic primer
ttcgacctaagcg

SEQ ID NO: 1467 - DNA, 13 bp, Artificial Sequence
  Description of Artificial Sequence: Synthetic primer
ccgtgcctttgcc

SEQ ID NO: 1468 - DNA, 13 bp, Artificial Sequence
  Description of Artificial Sequence: Synthetic primer
ggagagatttcca

SEQ ID NO: 1469 - DNA, 13 bp, Artificial Sequence
  Description of Artificial Sequence: Synthetic primer
ccatgattggacc

SEQ ID NO: 1470 - DNA, 13 bp, Artificial Sequence
  Description of Artificial Sequence: Synthetic primer
gacagcgcctttt

SEQ ID NO: 1471 - DNA, 13 bp, Artificial Sequence
  Description of Artificial Sequence: Synthetic primer
gagatatctgcac

SEQ ID NO: 1472 - DNA, 13 bp, Artificial Sequence
  Description of Artificial Sequence: Synthetic primer
ggacgacgagtta

SEQ ID NO: 1473 - DNA, 13 bp, Artificial Sequence
  Description of Artificial Sequence: Synthetic primer
aagtatctccagg

SEQ ID NO: 1474 - DNA, 13 bp, Artificial Sequence
  Description of Artificial Sequence: Synthetic primer
acaaccagtccca

SEQ ID NO: 1475 - DNA, 13 bp, Artificial Sequence
  Description of Artificial Sequence: Synthetic primer
tgcatcatattga

SEQ ID NO: 1476 - DNA, 13 bp, Artificial Sequence
  Description of Artificial Sequence: Synthetic primer
ctgttcgttgcca

SEQ ID NO: 1477 - DNA, 13 bp, Artificial Sequence
  Description of Artificial Sequence: Synthetic primer
ctgctgtcatgac

SEQ ID NO: 1478 - DNA, 13 bp, Artificial Sequence
  Description of Artificial Sequence: Synthetic primer
ctttaatcgcctg

SEQ ID NO: 1479 - DNA, 13 bp, Artificial Sequence
  Description of Artificial Sequence: Synthetic primer
ttccttggtaaag

SEQ ID NO: 1480 - DNA, 13 bp, Artificial Sequence
  Description of Artificial Sequence: Synthetic primer
cgctagccatggg

SEQ ID NO: 1481 - DNA, 13 bp, Artificial Sequence
  Description of Artificial Sequence: Synthetic primer
ggcagttttcttt

SEQ ID NO: 1482 - DNA, 13 bp, Artificial Sequence
  Description of Artificial Sequence: Synthetic primer
caaaggtggccat

SEQ ID NO: 1483 - DNA, 13 bp, Artificial Sequence
  Description of Artificial Sequence: Synthetic primer
attcccttggact

SEQ ID NO: 1484 - DNA, 13 bp, Artificial Sequence
  Description of Artificial Sequence: Synthetic primer
tttcgtagcagca

SEQ ID NO: 1485 - DNA, 13 bp, Artificial Sequence
  Description of Artificial Sequence: Synthetic primer
gcttgacttcgaa

SEQ ID NO: 1486 - DNA, 13 bp, Artificial Sequence
  Description of Artificial Sequence: Synthetic primer
tggtcaggataca

SEQ ID NO: 1487 - DNA, 13 bp, Artificial Sequence
  Description of Artificial Sequence: Synthetic primer
atactttccccca

SEQ ID NO: 1488 - DNA, 13 bp, Artificial Sequence
  Description of Artificial Sequence: Synthetic primer
acgtggaccagtc

SEQ ID NO: 1489 - DNA, 13 bp, Artificial Sequence
  Description of Artificial Sequence: Synthetic primer
ctgagcttctggc

SEQ ID NO: 1490 - DNA, 13 bp, Artificial Sequence
  Description of Artificial Sequence: Synthetic primer
gagaacagcacac

SEQ ID NO: 1491 - DNA, 13 bp, Artificial Sequence
  Description of Artificial Sequence: Synthetic primer
tgctcatccagca

SEQ ID NO: 1492 - DNA, 13 bp, Artificial Sequence
  Description of Artificial Sequence: Synthetic primer
acactccacgttg

SEQ ID NO: 1493 - DNA, 13 bp, Artificial Sequence
  Description of Artificial Sequence: Synthetic primer
tttccccttttac

SEQ ID NO: 1494 - DNA, 13 bp, Artificial Sequence
  Description of Artificial Sequence: Synthetic primer
gcatttgcagttt

SEQ ID NO: 1495 - DNA, 13 bp, Artificial Sequence
  Description of Artificial Sequence: Synthetic primer
tctctgccctcac

SEQ ID NO: 1496 - DNA, 13 bp, Artificial Sequence
  Description of Artificial Sequence: Synthetic primer
tgctccacctccc

SEQ ID NO: 1497 - DNA, 13 bp, Artificial Sequence
  Description of Artificial Sequence: Synthetic primer
gcctgtataacct

SEQ ID NO: 1498 - DNA, 13 bp, Artificial Sequence
  Description of Artificial Sequence: Synthetic primer
catcctgctcggg

SEQ ID NO: 1499 - DNA, 13 bp, Artificial Sequence
  Description of Artificial Sequence: Synthetic primer
gttctttctctga

SEQ ID NO: 1500 - DNA, 13 bp, Artificial Sequence
  Description of Artificial Sequence: Synthetic primer
ggtgaaatgggtg

SEQ ID NO: 1501 - DNA, 13 bp, Artificial Sequence
  Description of Artificial Sequence: Synthetic primer
ctcctgagtactg

SEQ ID NO: 1502 - DNA, 13 bp, Artificial Sequence
  Description of Artificial Sequence: Synthetic primer
cacgtacggagac

SEQ ID NO: 1503 - DNA, 13 bp, Artificial Sequence
  Description of Artificial Sequence: Synthetic primer
catctggctgcca

SEQ ID NO: 1504 - DNA, 13 bp, Artificial Sequence
  Description of Artificial Sequence: Synthetic primer
aatcagggctgcc

SEQ ID NO: 1505 - DNA, 13 bp, Artificial Sequence
  Description of Artificial Sequence: Synthetic primer
atgcatcatactc

SEQ ID NO: 1506 - DNA, 13 bp, Artificial Sequence
  Description of Artificial Sequence: Synthetic primer
ccgtctgtcgctt

SEQ ID NO: 1507 - DNA, 13 bp, Artificial Sequence
  Description of Artificial Sequence: Synthetic primer
cacaccgagaatg

SEQ ID NO: 1508 - DNA, 13 bp, Artificial Sequence
  Description of Artificial Sequence: Synthetic primer
gcgtaatacacag

SEQ ID NO: 1509 - DNA, 13 bp, Artificial Sequence
  Description of Artificial Sequence: Synthetic primer
gtgacgccgggta

SEQ ID NO: 1510 - DNA, 13 bp, Artificial Sequence
  Description of Artificial Sequence: Synthetic primer
cggtctctgcagt

SEQ ID NO: 1511 - DNA, 13 bp, Artificial Sequence
  Description of Artificial Sequence: Synthetic primer
tgggtgcaggctg

SEQ ID NO: 1512 - DNA, 13 bp, Artificial Sequence
  Description of Artificial Sequence: Synthetic primer
gagaagtttggtc

SEQ ID NO: 1513 - DNA, 13 bp, Artificial Sequence
  Description of Artificial Sequence: Synthetic primer
tgatacctgcttc

SEQ ID NO: 1514 - DNA, 13 bp, Artificial Sequence
  Description of Artificial Sequence: Synthetic primer
ccccgtcgtctag

SEQ ID NO: 1515 - DNA, 13 bp, Artificial Sequence
  Description of Artificial Sequence: Synthetic primer
gacaggagtatga

SEQ ID NO: 1516 - DNA, 13 bp, Artificial Sequence
  Description of Artificial Sequence: Synthetic primer
agggagtgatcca

SEQ ID NO: 1517 - DNA, 13 bp, Artificial Sequence
  Description of Artificial Sequence: Synthetic primer
caccgcaattaca

SEQ ID NO: 1518 - DNA, 13 bp, Artificial Sequence
  Description of Artificial Sequence: Synthetic primer
gcggtctgggcct

SEQ ID NO: 1519 - DNA, 13 bp, Artificial Sequence
  Description of Artificial Sequence: Synthetic primer
ttcctttgcggac

SEQ ID NO: 1520 - DNA, 13 bp, Artificial Sequence
  Description of Artificial Sequence: Synthetic primer
agtggttaatcct

SEQ ID NO: 1521 - DNA, 13 bp, Artificial Sequence
  Description of Artificial Sequence: Synthetic primer
tctgcttcttttt

SEQ ID NO: 1522 - DNA, 13 bp, Artificial Sequence
  Description of Artificial Sequence: Synthetic primer
agtgatccactcc

SEQ ID NO: 1523 - DNA, 13 bp, Artificial Sequence
  Description of Artificial Sequence: Synthetic primer
acgaacgaggcca

SEQ ID NO: 1524 - DNA, 13 bp, Artificial Sequence
  Description of Artificial Sequence: Synthetic primer
cagcaacagcaac

SEQ ID NO: 1525 - DNA, 13 bp, Artificial Sequence
  Description of Artificial Sequence: Synthetic primer
ggtacctgcttct

SEQ ID NO: 1526 - DNA, 13 bp, Artificial Sequence
  Description of Artificial Sequence: Synthetic primer
gctggttctaggg

SEQ ID NO: 1527 - DNA, 13 bp, Artificial Sequence
  Description of Artificial Sequence: Synthetic primer
acgcccccaaagt

SEQ ID NO: 1528 - DNA, 13 bp, Artificial Sequence
  Description of Artificial Sequence: Synthetic primer
gggtggtgtgtga

SEQ ID NO: 1529 - DNA, 13 bp, Artificial Sequence
  Description of Artificial Sequence: Synthetic primer
atgcatcgtactc

SEQ ID NO: 1530 - DNA, 13 bp, Artificial Sequence
  Description of Artificial Sequence: Synthetic primer
ccgaaaatgacac

SEQ ID NO: 1531 - DNA, 13 bp, Artificial Sequence
  Description of Artificial Sequence: Synthetic primer
cttcacgtacggg

SEQ ID NO: 1532 - DNA, 13 bp, Artificial Sequence
  Description of Artificial Sequence: Synthetic primer
tcagacagttgca

SEQ ID NO: 1533 - DNA, 13 bp, Artificial Sequence
  Description of Artificial Sequence: Synthetic primer
gagtaatttgaga

SEQ ID NO: 1534 - DNA, 13 bp, Artificial Sequence
  Description of Artificial Sequence: Synthetic primer
caacaggggatga

SEQ ID NO: 1535 - DNA, 13 bp, Artificial Sequence
  Description of Artificial Sequence: Synthetic primer
gtggacgtggtct

SEQ ID NO: 1536 - DNA, 13 bp, Artificial Sequence
  Description of Artificial Sequence: Synthetic primer
catttgtatggcc

SEQ ID NO: 1537 - DNA, 13 bp, Artificial Sequence
  Description of Artificial Sequence: Synthetic primer
gctctgtcctttc

SEQ ID NO: 1538 - DNA, 13 bp, Artificial Sequence
  Description of Artificial Sequence: Synthetic primer
aagcactcaacat

SEQ ID NO: 1539 - DNA, 13 bp, Artificial Sequence
  Description of Artificial Sequence: Synthetic primer
ggcctctgtagta

SEQ ID NO: 1540 - DNA, 13 bp, Artificial Sequence
  Description of Artificial Sequence: Synthetic primer
ttattgaagcatg

SEQ ID NO: 1541 - DNA, 13 bp, Artificial Sequence
  Description of Artificial Sequence: Synthetic primer
gattttcagcgtt

SEQ ID NO: 1542 - DNA, 13 bp, Artificial Sequence
  Description of Artificial Sequence: Synthetic primer
tgagaacagtacg

SEQ ID NO: 1543 - DNA, 13 bp, Artificial Sequence
  Description of Artificial Sequence: Synthetic primer
gacaaccccatgt

SEQ ID NO: 1544 - DNA, 13 bp, Artificial Sequence
  Description of Artificial Sequence: Synthetic primer
cataatgcacgga

SEQ ID NO: 1545 - DNA, 13 bp, Artificial Sequence
  Description of Artificial Sequence: Synthetic primer
gtggttgtcagtc

SEQ ID NO: 1546 - DNA, 13 bp, Artificial Sequence
  Description of Artificial Sequence: Synthetic primer
ttgttgaccaacc

SEQ ID NO: 1547 - DNA, 13 bp, Artificial Sequence
  Description of Artificial Sequence: Synthetic primer
gcctgtatgacct

SEQ ID NO: 1548 - DNA, 13 bp, Artificial Sequence
  Description of Artificial Sequence: Synthetic primer
ctttctctgatgc

SEQ ID NO: 1549 - DNA, 13 bp, Artificial Sequence
  Description of Artificial Sequence: Synthetic primer
ctccgagcatctg

SEQ ID NO: 1550 - DNA, 13 bp, Artificial Sequence
  Description of Artificial Sequence: Synthetic primer
atctttctgctgt

SEQ ID NO: 1551 - DNA, 13 bp, Artificial Sequence
  Description of Artificial Sequence: Synthetic primer
aaccggcctcctg

SEQ ID NO: 1552 - DNA, 13 bp, Artificial Sequence
  Description of Artificial Sequence: Synthetic primer
cgctctgtcgtct

SEQ ID NO: 1553 - DNA, 13 bp, Artificial Sequence
  Description of Artificial Sequence: Synthetic primer
accctgctcgggt

SEQ ID NO: 1554 - DNA, 13 bp, Artificial Sequence
  Description of Artificial Sequence: Synthetic primer
cttcacttgctcc

SEQ ID NO: 1555 - DNA, 13 bp, Artificial Sequence
  Description of Artificial Sequence: Synthetic primer
tcagtgctgcaac

SEQ ID NO: 1556 - DNA, 13 bp, Artificial Sequence
  Description of Artificial Sequence: Synthetic primer
tcgctgtctgtca

SEQ ID NO: 1557 - DNA, 13 bp, Artificial Sequence
  Description of Artificial Sequence: Synthetic primer
cagtagcatgatg

SEQ ID NO: 1558 - DNA, 13 bp, Artificial Sequence
  Description of Artificial Sequence: Synthetic primer
taccttaccttca

SEQ ID NO: 1559 - DNA, 13 bp, Artificial Sequence
  Description of Artificial Sequence: Synthetic primer
gactcctgggaag

SEQ ID NO: 1560 - DNA, 13 bp, Artificial Sequence
  Description of Artificial Sequence: Synthetic primer
tgcctgattgatt

SEQ ID NO: 1561 - DNA, 13 bp, Artificial Sequence
  Description of Artificial Sequence: Synthetic primer
cgaaggtggccat

SEQ ID NO: 1562 - DNA, 13 bp, Artificial Sequence
  Description of Artificial Sequence: Synthetic primer
cccggtccccttc

SEQ ID NO: 1563 - DNA, 13 bp, Artificial Sequence
  Description of Artificial Sequence: Synthetic primer
tatgaggaagatt

SEQ ID NO: 1564 - DNA, 13 bp, Artificial Sequence
  Description of Artificial Sequence: Synthetic primer
agattaagaaaaa

SEQ ID NO: 1565 - DNA, 13 bp, Artificial Sequence
  Description of Artificial Sequence: Synthetic primer
tgatgaagattaa

SEQ ID NO: 1566 - DNA, 13 bp, Artificial Sequence
  Description of Artificial Sequence: Synthetic primer
atttcttccatgc

SEQ ID NO: 1567 - DNA, 13 bp, Artificial Sequence
  Description of Artificial Sequence: Synthetic primer
gaggaaaattttg

SEQ ID NO: 1568 - DNA, 13 bp, Artificial Sequence
  Description of Artificial Sequence: Synthetic primer
ggaaaattgcctt

SEQ ID NO: 1569 - DNA, 13 bp, Artificial Sequence
  Description of Artificial Sequence: Synthetic primer
agcaattcaaagt

SEQ ID NO: 1570 - DNA, 13 bp, Artificial Sequence
  Description of Artificial Sequence: Synthetic primer
aagattcacacca

SEQ ID NO: 1571 - DNA, 13 bp, Artificial Sequence
  Description of Artificial Sequence: Synthetic primer
gtatagagtcaga

SEQ ID NO: 1572 - DNA, 13 bp, Artificial Sequence
  Description of Artificial Sequence: Synthetic primer
tacaatcttgcat

SEQ ID NO: 1573 - DNA, 13 bp, Artificial Sequence
  Description of Artificial Sequence: Synthetic primer
tcatgtgctcaaa

SEQ ID NO: 1574 - DNA, 13 bp, Artificial Sequence
  Description of Artificial Sequence: Synthetic primer
ttcttcctgtatg

SEQ ID NO: 1575 - DNA, 13 bp, Artificial Sequence
  Description of Artificial Sequence: Synthetic primer
tggatttcggaac

SEQ ID NO: 1576 - DNA, 13 bp, Artificial Sequence
  Description of Artificial Sequence: Synthetic primer
gctcaagctcgtt

SEQ ID NO: 1577 - DNA, 13 bp, Artificial Sequence
  Description of Artificial Sequence: Synthetic primer
ttcaagagagtgc

SEQ ID NO: 1578 - DNA, 13 bp, Artificial Sequence
  Description of Artificial Sequence: Synthetic primer
gaagcggttcaag

SEQ ID NO: 1579 - DNA, 13 bp, Artificial Sequence
  Description of Artificial Sequence: Synthetic primer
caactgcaaattc

SEQ ID NO: 1580 - DNA, 13 bp, Artificial Sequence
  Description of Artificial Sequence: Synthetic primer
aagagaggccatt

SEQ ID NO: 1581 - DNA, 13 bp, Artificial Sequence
  Description of Artificial Sequence: Synthetic primer
tggtagtaggaga

SEQ ID NO: 1582 - DNA, 13 bp, Artificial Sequence
  Description of Artificial Sequence: Synthetic primer
gagtcatccttgc

SEQ ID NO: 1583 - DNA, 13 bp, Artificial Sequence
  Description of Artificial Sequence: Synthetic primer
acaattccacaag

SEQ ID NO: 1584 - DNA, 13 bp, Artificial Sequence
  Description of Artificial Sequence: Synthetic primer
ttgtacgaagctg

SEQ ID NO: 1585 - DNA, 13 bp, Artificial Sequence
  Description of Artificial Sequence: Synthetic primer
ctagacgaggacg

SEQ ID NO: 1586 - DNA, 13 bp, Artificial Sequence
  Description of Artificial Sequence: Synthetic primer
tgacaattggtgg

SEQ ID NO: 1587 - DNA, 13 bp, Artificial Sequence
  Description of Artificial Sequence: Synthetic primer
atcactttattcg

SEQ ID NO: 1588 - DNA, 13 bp, Artificial Sequence
  Description of Artificial Sequence: Synthetic primer
aaggaacacgcac

SEQ ID NO: 1589 - DNA, 13 bp, Artificial Sequence
  Description of Artificial Sequence: Synthetic primer
tgtaccagtggcg

SEQ ID NO: 1590 - DNA, 13 bp, Artificial Sequence
  Description of Artificial Sequence: Synthetic primer
gcagtattgaaat

SEQ ID NO: 1591 - DNA, 13 bp, Artificial Sequence
  Description of Artificial Sequence: Synthetic primer
gcaatgaattttt

SEQ ID NO: 1592 - DNA, 13 bp, Artificial Sequence
  Description of Artificial Sequence: Synthetic primer
ggacgatacaatc

SEQ ID NO: 1593 - DNA, 13 bp, Artificial Sequence
  Description of Artificial Sequence: Synthetic primer
tttcatcttttct

SEQ ID NO: 1594 - DNA, 13 bp, Artificial Sequence
  Description of Artificial Sequence: Synthetic primer
tcctctaaaagga

SEQ ID NO: 1595 - DNA, 13 bp, Artificial Sequence
  Description of Artificial Sequence: Synthetic primer
cacgtgtcattct

SEQ ID NO: 1596 - DNA, 13 bp, Artificial Sequence
  Description of Artificial Sequence: Synthetic primer
ctggccaagctga

SEQ ID NO: 1597 - DNA, 13 bp, Artificial Sequence
  Description of Artificial Sequence: Synthetic primer
aaacaatctcctc

SEQ ID NO: 1598 - DNA, 13 bp, Artificial Sequence
  Description of Artificial Sequence: Synthetic primer
atctaacatctcc

SEQ ID NO: 1599 - DNA, 13 bp, Artificial Sequence
  Description of Artificial Sequence: Synthetic primer
ggtgagttttcag

SEQ ID NO: 1600 - DNA, 13 bp, Artificial Sequence
  Description of Artificial Sequence: Synthetic primer
tgacaaatgataa

SEQ ID NO: 1601 - DNA, 13 bp, Artificial Sequence
  Description of Artificial Sequence: Synthetic primer
aacaatccaggat

SEQ ID NO: 1602 - DNA, 13 bp, Artificial Sequence
  Description of Artificial Sequence: Synthetic primer
attctcgtcctca

SEQ ID NO: 1603 - DNA, 13 bp, Artificial Sequence
  Description of Artificial Sequence: Synthetic primer
gaggcattcttca

SEQ ID NO: 1604 - DNA, 13 bp, Artificial Sequence
  Description of Artificial Sequence: Synthetic primer
gacacacctaagg

SEQ ID NO: 1605 - DNA, 13 bp, Artificial Sequence
  Description of Artificial Sequence: Synthetic primer
caattgcactcgg

SEQ ID NO: 1606 - DNA, 13 bp, Artificial Sequence
  Description of Artificial Sequence: Synthetic primer
ttaaatataactg

SEQ ID NO: 1607 - DNA, 13 bp, Artificial Sequence
  Description of Artificial Sequence: Synthetic primer
catcagcattcat

SEQ ID NO: 1608 - DNA, 13 bp, Artificial Sequence
  Description of Artificial Sequence: Synthetic primer
agtgacttaagta

SEQ ID NO: 1609 - DNA, 13 bp, Artificial Sequence
  Description of Artificial Sequence: Synthetic primer
acatccgctctcg

SEQ ID NO: 1610 - DNA, 13 bp, Artificial Sequence
  Description of Artificial Sequence: Synthetic primer
cttaacttcattt

SEQ ID NO: 1611 - DNA, 13 bp, Artificial Sequence
  Description of Artificial Sequence: Synthetic primer
ggggacatgctca

SEQ ID NO: 1612 - DNA, 13 bp, Artificial Sequence
  Description of Artificial Sequence: Synthetic primer
taaaagcattacg

SEQ ID NO: 1613 - DNA, 13 bp, Artificial Sequence
  Description of Artificial Sequence: Synthetic primer
tgcagttacctcg

SEQ ID NO: 1614 - DNA, 13 bp, Artificial Sequence
  Description of Artificial Sequence: Synthetic primer
atctcgtatcgct

SEQ ID NO: 1615 - DNA, 13 bp, Artificial Sequence
  Description of Artificial Sequence: Synthetic primer
actaaaagatggg

SEQ ID NO: 1616 - DNA, 13 bp, Artificial Sequence
  Description of Artificial Sequence: Synthetic primer
acagtgacaacac

SEQ ID NO: 1617 - DNA, 13 bp, Artificial Sequence
  Description of Artificial Sequence: Synthetic primer
catgttcgagcac

SEQ ID NO: 1618 - DNA, 13 bp, Artificial Sequence
  Description of Artificial Sequence: Synthetic primer
tagtgcataaatc

SEQ ID NO: 1619 - DNA, 13 bp, Artificial Sequence
  Description of Artificial Sequence: Synthetic primer
aggaagggccgat

SEQ ID NO: 1620 - DNA, 13 bp, Artificial Sequence
  Description of Artificial Sequence: Synthetic primer
gctaactcatata

SEQ ID NO: 1621 - DNA, 13 bp, Artificial Sequence
  Description of Artificial Sequence: Synthetic primer
gatatcaaagtac

SEQ ID NO: 1622 - DNA, 13 bp, Artificial Sequence
  Description of Artificial Sequence: Synthetic primer
tgtaataatcaga

SEQ ID NO: 1623 - DNA, 13 bp, Artificial Sequence
  Description of Artificial Sequence: Synthetic primer
gtcttaatgcaaa

SEQ ID NO: 1624 - DNA, 13 bp, Artificial Sequence
  Description of Artificial Sequence: Synthetic primer
gtttaatctgtgg

SEQ ID NO: 1625 - DNA, 13 bp, Artificial Sequence
  Description of Artificial Sequence: Synthetic primer
gattccaagacaa

SEQ ID NO: 1626 - DNA, 13 bp, Artificial Sequence
  Description of Artificial Sequence: Synthetic primer
atatatggaggcc

SEQ ID NO: 1627 - DNA, 13 bp, Artificial Sequence
  Description of Artificial Sequence: Synthetic primer
tgatacacttgtg

SEQ ID NO: 1628 - DNA, 13 bp, Artificial Sequence
  Description of Artificial Sequence: Synthetic primer
acatcagtggtca

SEQ ID NO: 1629 - DNA, 13 bp, Artificial Sequence
  Description of Artificial Sequence: Synthetic primer
tccggacaacagc

SEQ ID NO: 1630 - DNA, 13 bp, Artificial Sequence
  Description of Artificial Sequence: Synthetic primer
gattgattgatga

SEQ ID NO: 1631 - DNA, 13 bp, Artificial Sequence
  Description of Artificial Sequence: Synthetic primer
attggaaaccagg

SEQ ID NO: 1632 - DNA, 13 bp, Artificial Sequence
  Description of Artificial Sequence: Synthetic primer
cggaacataaatt

SEQ ID NO: 1633 - DNA, 13 bp, Artificial Sequence
  Description of Artificial Sequence: Synthetic primer
ttatcacatcaca

SEQ ID NO: 1634 - DNA, 13 bp, Artificial Sequence
  Description of Artificial Sequence: Synthetic primer
aggctgacagggc

SEQ ID NO: 1635 - DNA, 13 bp, Artificial Sequence
  Description of Artificial Sequence: Synthetic primer
aggcagacccact

SEQ ID NO: 1636 - DNA, 13 bp, Artificial Sequence
  Description of Artificial Sequence: Synthetic primer
ctattgctggagt

SEQ ID NO: 1637 - DNA, 13 bp, Artificial Sequence
  Description of Artificial Sequence: Synthetic primer
acaattcttcgga

SEQ ID NO: 1638 - DNA, 13 bp, Artificial Sequence
  Description of Artificial Sequence: Synthetic primer
aaaatcggggccc

SEQ ID NO: 1639 - DNA, 13 bp, Artificial Sequence
  Description of Artificial Sequence: Synthetic primer
ttgtgtgcgaata

SEQ ID NO: 1640 - DNA, 13 bp, Artificial Sequence
  Description of Artificial Sequence: Synthetic primer
agaacaacctagg

SEQ ID NO: 1641 - DNA, 13 bp, Artificial Sequence
  Description of Artificial Sequence: Synthetic primer
ttgttactgtaat

SEQ ID NO: 1642 - DNA, 13 bp, Artificial Sequence
  Description of Artificial Sequence: Synthetic primer
tctcattgaaatt

SEQ ID NO: 1643 - DNA, 13 bp, Artificial Sequence
  Description of Artificial Sequence: Synthetic primer
tcgggacccattt

SEQ ID NO: 1644 - DNA, 13 bp, Artificial Sequence
  Description of Artificial Sequence: Synthetic primer
ttcagagccatat

SEQ ID NO: 1645 - DNA, 13 bp, Artificial Sequence
  Description of Artificial Sequence: Synthetic primer
catcagtgtgctc

SEQ ID NO: 1646 - DNA, 13 bp, Artificial Sequence
  Description of Artificial Sequence: Synthetic primer
gacacacaaaaag

SEQ ID NO: 1647 - DNA, 13 bp, Artificial Sequence
  Description of Artificial Sequence: Synthetic primer
aaagtcgaaccca

SEQ ID NO: 1648 - DNA, 13 bp, Artificial Sequence
  Description of Artificial Sequence: Synthetic primer
atggctaaagcca

SEQ ID NO: 1649 - DNA, 13 bp, Artificial Sequence
  Description of Artificial Sequence: Synthetic primer
gtgagagtcatct

SEQ ID NO: 1650 - DNA, 13 bp, Artificial Sequence
  Description of Artificial Sequence: Synthetic primer
atagcaacattat

SEQ ID NO: 1651 - DNA, 13 bp, Artificial Sequence
  Description of Artificial Sequence: Synthetic primer
accaggctttcct

SEQ ID NO: 1652 - DNA, 13 bp, Artificial Sequence
  Description of Artificial Sequence: Synthetic primer
tggagttgccaca

SEQ ID NO: 1653 - DNA, 13 bp, Artificial Sequence
  Description of Artificial Sequence: Synthetic primer
gaggctattcaag

SEQ ID NO: 1654 - DNA, 13 bp, Artificial Sequence
  Description of Artificial Sequence: Synthetic primer
gataatgatgata

SEQ ID NO: 1655 - DNA, 13 bp, Artificial Sequence
  Description of Artificial Sequence: Synthetic primer
agtatctactgat

SEQ ID NO: 1656 - DNA, 13 bp, Artificial Sequence
  Description of Artificial Sequence: Synthetic primer
acaggccccacac

SEQ ID NO: 1657 - DNA, 13 bp, Artificial Sequence
  Description of Artificial Sequence: Synthetic primer
ctggcttcaactg

SEQ ID NO: 1658 - DNA, 13 bp, Artificial Sequence
  Description of Artificial Sequence: Synthetic primer
acgagacagaaga

SEQ ID NO: 1659 - DNA, 13 bp, Artificial Sequence
  Description of Artificial Sequence: Synthetic primer
atgccttagtctg

SEQ ID NO: 1660 - DNA, 13 bp, Artificial Sequence
  Description of Artificial Sequence: Synthetic primer
ttagcctactcca

SEQ ID NO: 1661 - DNA, 13 bp, Artificial Sequence
  Description of Artificial Sequence: Synthetic primer
taacttcaacagt

SEQ ID NO: 1662 - DNA, 13 bp, Artificial Sequence
  Description of Artificial Sequence: Synthetic primer
tcctcaccgacca

SEQ ID NO: 1663 - DNA, 13 bp, Artificial Sequence
  Description of Artificial Sequence: Synthetic primer
ttattctccacga

SEQ ID NO: 1664 - DNA, 13 bp, Artificial Sequence
  Description of Artificial Sequence: Synthetic primer
tcgtacaatgtgc

SEQ ID NO: 1665 - DNA, 13 bp, Artificial Sequence
  Description of Artificial Sequence: Synthetic primer
gtgccgactgcac

SEQ ID NO: 1666 - DNA, 13 bp, Artificial Sequence
  Description of Artificial Sequence: Synthetic primer
ctcactgatcaag

SEQ ID NO: 1667 - DNA, 13 bp, Artificial Sequence
  Description of Artificial Sequence: Synthetic primer
acttgcttaggaa

SEQ ID NO: 1668 - DNA, 13 bp, Artificial Sequence
  Description of Artificial Sequence: Synthetic primer
gttccaaaccaca

SEQ ID NO: 1669 - DNA, 13 bp, Artificial Sequence
  Description of Artificial Sequence: Synthetic primer
caacagtctgaag

SEQ ID NO: 1670 - DNA, 13 bp, Artificial Sequence
  Description of Artificial Sequence: Synthetic primer
agtatatacgatt

SEQ ID NO: 1671 - DNA, 13 bp, Artificial Sequence
  Description of Artificial Sequence: Synthetic primer
tctgtgcaaaact

SEQ ID NO: 1672 - DNA, 13 bp, Artificial Sequence
  Description of Artificial Sequence: Synthetic primer
ctaagattcaact

SEQ ID NO: 1673 - DNA, 13 bp, Artificial Sequence
  Description of Artificial Sequence: Synthetic primer
ttttatttgggta

SEQ ID NO: 1674 - DNA, 13 bp, Artificial Sequence
  Description of Artificial Sequence: Synthetic primer
tgcaactgcccac

SEQ ID NO: 1675 - DNA, 13 bp, Artificial Sequence
  Description of Artificial Sequence: Synthetic primer
ttgatctcttcaa

SEQ ID NO: 1676 - DNA, 13 bp, Artificial Sequence
  Description of Artificial Sequence: Synthetic primer
gccagttgctctt

SEQ ID NO: 1677 - DNA, 13 bp, Artificial Sequence
  Description of Artificial Sequence: Synthetic primer
aaatcatgcaaca

SEQ ID NO: 1678 - DNA, 13 bp, Artificial Sequence
  Description of Artificial Sequence: Synthetic primer
tggatcacaggat

SEQ ID NO: 1679 - DNA, 13 bp, Artificial Sequence
  Description of Artificial Sequence: Synthetic primer
gacaagatccatt

SEQ ID NO: 1680 - DNA, 13 bp, Artificial Sequence
  Description of Artificial Sequence: Synthetic primer
ggtcttctgattg

SEQ ID NO: 1681 - DNA, 13 bp, Artificial Sequence
  Description of Artificial Sequence: Synthetic primer
ttaattacaaggg

SEQ ID NO: 1682 - DNA, 13 bp, Artificial Sequence
  Description of Artificial Sequence: Synthetic primer
tagtcaatatgtt

SEQ ID NO: 1683 - DNA, 13 bp, Artificial Sequence
  Description of Artificial Sequence: Synthetic primer
cctcctgcaccag

SEQ ID NO: 1684 - DNA, 13 bp, Artificial Sequence
  Description of Artificial Sequence: Synthetic primer
cctctcctccaat

SEQ ID NO: 1685 - DNA, 13 bp, Artificial Sequence
  Description of Artificial Sequence: Synthetic primer
ttgctactgaaca

SEQ ID NO: 1686 - DNA, 13 bp, Artificial Sequence
  Description of Artificial Sequence: Synthetic primer
cttaagatatatg

SEQ ID NO: 1687 - DNA, 13 bp, Artificial Sequence
  Description of Artificial Sequence: Synthetic primer
gtgggtcgtattg

SEQ ID NO: 1688 - DNA, 13 bp, Artificial Sequence
  Description of Artificial Sequence: Synthetic primer
taagtattaagaa

SEQ ID NO: 1689 - DNA, 13 bp, Artificial Sequence
  Description of Artificial Sequence: Synthetic primer
ttgagctttgttg

SEQ ID NO: 1690 - DNA, 13 bp, Artificial Sequence
  Description of Artificial Sequence: Synthetic primer
tatacaggaagaa

SEQ ID NO: 1691 - DNA, 13 bp, Artificial Sequence
  Description of Artificial Sequence: Synthetic primer
aggtatgaattca

SEQ ID NO: 1692 - DNA, 13 bp, Artificial Sequence
  Description of Artificial Sequence: Synthetic primer
atgtccctgtagc

SEQ ID NO: 1693 - DNA, 13 bp, Artificial Sequence
  Description of Artificial Sequence: Synthetic primer
tggatcaactgat

SEQ ID NO: 1694 - DNA, 13 bp, Artificial Sequence
  Description of Artificial Sequence: Synthetic primer
actataggaaata

SEQ ID NO: 1695 - DNA, 13 bp, Artificial Sequence
  Description of Artificial Sequence: Synthetic primer
actgcaacttatc

SEQ ID NO: 1696 - DNA, 13 bp, Artificial Sequence
  Description of Artificial Sequence: Synthetic primer
tacccaaacttgt

SEQ ID NO: 1697 - DNA, 13 bp, Artificial Sequence
  Description of Artificial Sequence: Synthetic primer
cttggacaattgg

SEQ ID NO: 1698 - DNA, 13 bp, Artificial Sequence
  Description of Artificial Sequence: Synthetic primer
tgactcttccaat

SEQ ID NO: 1699 - DNA, 13 bp, Artificial Sequence
  Description of Artificial Sequence: Synthetic primer
cctgggtcactca

SEQ ID NO: 1700 - DNA, 13 bp, Artificial Sequence
  Description of Artificial Sequence: Synthetic primer
gcaagcaattttt

SEQ ID NO: 1701 - DNA, 13 bp, Artificial Sequence
  Description of Artificial Sequence: Synthetic primer
tgtgtcaatttat

SEQ ID NO: 1702 - DNA, 13 bp, Artificial Sequence
  Description of Artificial Sequence: Synthetic primer
ctaagggtttacc

SEQ ID NO: 1703 - DNA, 13 bp, Artificial Sequence
  Description of Artificial Sequence: Synthetic primer
gagtatttgtttc

SEQ ID NO: 1704 - DNA, 13 bp, Artificial Sequence
  Description of Artificial Sequence: Synthetic primer
ctcaatcactcaa

SEQ ID NO: 1705 - DNA, 13 bp, Artificial Sequence
  Description of Artificial Sequence: Synthetic primer
gccaaaatatttc

SEQ ID NO: 1706 - DNA, 13 bp, Artificial Sequence
  Description of Artificial Sequence: Synthetic primer
aaaagtaggtcca

SEQ ID NO: 1707 - DNA, 13 bp, Artificial Sequence
  Description of Artificial Sequence: Synthetic primer
acagaggtgtttg

SEQ ID NO: 1708 - DNA, 13 bp, Artificial Sequence
  Description of Artificial Sequence: Synthetic primer
gaaccagaacttt

SEQ ID NO: 1709 - DNA, 13 bp, Artificial Sequence
  Description of Artificial Sequence: Synthetic primer
tgaagaaagccgc

SEQ ID NO: 1710 - DNA, 13 bp, Artificial Sequence
  Description of Artificial Sequence: Synthetic primer
acttttatgttta

SEQ ID NO: 1711 - DNA, 13 bp, Artificial Sequence
  Description of Artificial Sequence: Synthetic primer
caaaaacagatat

SEQ ID NO: 1712 - DNA, 13 bp, Artificial Sequence
  Description of Artificial Sequence: Synthetic primer
ggcctcagcattc

SEQ ID NO: 1713 - DNA, 13 bp, Artificial Sequence
  Description of Artificial Sequence: Synthetic primer
tacatgtgtagtc

SEQ ID NO: 1714 - DNA, 13 bp, Artificial Sequence
  Description of Artificial Sequence: Synthetic primer
atgtttctgatct

SEQ ID NO: 1715 - DNA, 13 bp, Artificial Sequence
  Description of Artificial Sequence: Synthetic primer
cataagcttataa

SEQ ID NO: 1716 - DNA, 13 bp, Artificial Sequence
  Description of Artificial Sequence: Synthetic primer
ctctcccaatcaa

SEQ ID NO: 1717 - DNA, 13 bp, Artificial Sequence
  Description of Artificial Sequence: Synthetic primer
ccctgaatcgcag

SEQ ID NO: 1718 - DNA, 13 bp, Artificial Sequence
  Description of Artificial Sequence: Synthetic primer
ggcaatttaattg

SEQ ID NO: 1719 - DNA, 13 bp, Artificial Sequence
  Description of Artificial Sequence: Synthetic primer
ccgaagccatcac

SEQ ID NO: 1720 - DNA, 13 bp, Artificial Sequence
  Description of Artificial Sequence: Synthetic primer
caattgccccgtg

SEQ ID NO: 1721 - DNA, 13 bp, Artificial Sequence
  Description of Artificial Sequence: Synthetic primer
cggattaaatgtt

SEQ ID NO: 1722 - DNA, 13 bp, Artificial Sequence
  Description of Artificial Sequence: Synthetic primer
atgagtttacagc

SEQ ID NO: 1723 - DNA, 13 bp, Artificial Sequence
  Description of Artificial Sequence: Synthetic primer
ttgtggaggaggt

SEQ ID NO: 1724 - DNA, 13 bp, Artificial Sequence
  Description of Artificial Sequence: Synthetic primer
tgtgcacaaatct

SEQ ID NO: 1725 - DNA, 13 bp, Artificial Sequence
  Description of Artificial Sequence: Synthetic primer
agctgcaacaatt

SEQ ID NO: 1726 - DNA, 13 bp, Artificial Sequence
  Description of Artificial Sequence: Synthetic primer
aggaaatcaagcc

SEQ ID NO: 1727 - DNA, 13 bp, Artificial Sequence
  Description of Artificial Sequence: Synthetic primer
ggacgagcttttg

SEQ ID NO: 1728 - DNA, 13 bp, Artificial Sequence
  Description of Artificial Sequence: Synthetic primer
tttctgcaattgc

SEQ ID NO: 1729 - DNA, 13 bp, Artificial Sequence
  Description of Artificial Sequence: Synthetic primer
ttctttttgacct

SEQ ID NO: 1730 - DNA, 13 bp, Artificial Sequence
  Description of Artificial Sequence: Synthetic primer
aagggactagaac

SEQ ID NO: 1731 - DNA, 13 bp, Artificial Sequence
  Description of Artificial Sequence: Synthetic primer
tgctcaaattaca

SEQ ID NO: 1732 - DNA, 13 bp, Artificial Sequence
  Description of Artificial Sequence: Synthetic primer
aacaaaagactca

SEQ ID NO: 1733 - DNA, 13 bp, Artificial Sequence
  Description of Artificial Sequence: Synthetic primer
gttgtcggagaaa

SEQ ID NO: 1734 - DNA, 13 bp, Artificial Sequence
  Description of Artificial Sequence: Synthetic primer
gagaattttcagg

SEQ ID NO: 1735 - DNA, 13 bp, Artificial Sequence
  Description of Artificial Sequence: Synthetic primer
taaaagcattgcg

SEQ ID NO: 1736 - DNA, 13 bp, Artificial Sequence
  Description of Artificial Sequence: Synthetic primer
taatgcacaatca

SEQ ID NO: 1737 - DNA, 13 bp, Artificial Sequence
  Description of Artificial Sequence: Synthetic primer
agatagcacaagt

SEQ ID NO: 1738 - DNA, 13 bp, Artificial Sequence
  Description of Artificial Sequence: Synthetic primer
ctatgctcatttc

SEQ ID NO: 1739 - DNA, 13 bp, Artificial Sequence
  Description of Artificial Sequence: Synthetic primer
caaccccgtcgac

SEQ ID NO: 1740 - DNA, 13 bp, Artificial Sequence
  Description of Artificial Sequence: Synthetic primer
gctcgcttttcag

SEQ ID NO: 1741 - DNA, 13 bp, Artificial Sequence
  Description of Artificial Sequence: Synthetic primer
cgtcatccaatga

SEQ ID NO: 1742 - DNA, 13 bp, Artificial Sequence
  Description of Artificial Sequence: Synthetic primer
agagcccaggatc

SEQ ID NO: 1743 - DNA, 13 bp, Artificial Sequence
  Description of Artificial Sequence: Synthetic primer
atggaggaacaaa

SEQ ID NO: 1744 - DNA, 13 bp, Artificial Sequence
  Description of Artificial Sequence: Synthetic primer
actcaccaacacc

SEQ ID NO: 1745 - DNA, 13 bp, Artificial Sequence
  Description of Artificial Sequence: Synthetic primer
ttgacgatcatga

SEQ ID NO: 1746 - DNA, 13 bp, Artificial Sequence
  Description of Artificial Sequence: Synthetic primer
atccaagacatgg

SEQ ID NO: 1747 - DNA, 13 bp, Artificial Sequence
  Description of Artificial Sequence: Synthetic primer
cgtttattctagt

SEQ ID NO: 1748 - DNA, 13 bp, Artificial Sequence
  Description of Artificial Sequence: Synthetic primer
tttttcttaatct

SEQ ID NO: 1749 - DNA, 13 bp, Artificial Sequence
  Description of Artificial Sequence: Synthetic primer
gctggaagctgat

SEQ ID NO: 1750 - DNA, 13 bp, Artificial Sequence
  Description of Artificial Sequence: Synthetic primer
accatgtgcatcc

SEQ ID NO: 1751 - DNA, 13 bp, Artificial Sequence
  Description of Artificial Sequence: Synthetic primer
aatcagttacaaa

SEQ ID NO: 1752 - DNA, 13 bp, Artificial Sequence
  Description of Artificial Sequence: Synthetic primer
cttcaaaggcctg

SEQ ID NO: 1753 - DNA, 13 bp, Artificial Sequence
  Description of Artificial Sequence: Synthetic primer
tggtaaaattccc

SEQ ID NO: 1754 - DNA, 13 bp, Artificial Sequence
  Description of Artificial Sequence: Synthetic primer
ccatgctcaagat

SEQ ID NO: 1755 - DNA, 13 bp, Artificial Sequence
  Description of Artificial Sequence: Synthetic primer
tgggattttgaga

SEQ ID NO: 1756 - DNA, 13 bp, Artificial Sequence
  Description of Artificial Sequence: Synthetic primer
ccccagtgttttt

SEQ ID NO: 1757 - DNA, 13 bp, Artificial Sequence
  Description of Artificial Sequence: Synthetic primer
atataaggtttga

SEQ ID NO: 1758 - DNA, 13 bp, Artificial Sequence
  Description of Artificial Sequence: Synthetic primer
tttgaaataaatg

SEQ ID NO: 1759 - DNA, 13 bp, Artificial Sequence
  Description of Artificial Sequence: Synthetic primer
cttggtatttctg

SEQ ID NO: 1760 - DNA, 13 bp, Artificial Sequence
  Description of Artificial Sequence: Synthetic primer
aaggacattttgg

SEQ ID NO: 1761 - DNA, 13 bp, Artificial Sequence
  Description of Artificial Sequence: Synthetic primer
agatggttttggt

SEQ ID NO: 1762 - DNA, 13 bp, Artificial Sequence
  Description of Artificial Sequence: Synthetic primer
gttcttaaccctg

SEQ ID NO: 1763 - DNA, 13 bp, Artificial Sequence
  Description of Artificial Sequence: Synthetic primer
atcgcgttgctga

SEQ ID NO: 1764 - DNA, 13 bp, Artificial Sequence
  Description of Artificial Sequence: Synthetic primer
aacttgagaatat

SEQ ID NO: 1765 - DNA, 13 bp, Artificial Sequence
  Description of Artificial Sequence: Synthetic primer
ctctgtcacctgc

SEQ ID NO: 1766 - DNA, 13 bp, Artificial Sequence
  Description of Artificial Sequence: Synthetic primer
cgtgaggatgtac

SEQ ID NO: 1767 - DNA, 13 bp, Artificial Sequence
  Description of Artificial Sequence: Synthetic primer
ctcgaatctctgc

SEQ ID NO: 1768 - DNA, 13 bp, Artificial Sequence
  Description of Artificial Sequence: Synthetic primer
ccgttttccgagt

SEQ ID NO: 1769 - DNA, 13 bp, Artificial Sequence
  Description of Artificial Sequence: Synthetic primer
ccctaacactttg

SEQ ID NO: 1770 - DNA, 13 bp, Artificial Sequence
  Description of Artificial Sequence: Synthetic primer
agttgcgtagttg

SEQ ID NO: 1771 - DNA, 13 bp, Artificial Sequence
  Description of Artificial Sequence: Synthetic primer
tgtttatattctc

SEQ ID NO: 1772 - DNA, 13 bp, Artificial Sequence
  Description of Artificial Sequence: Synthetic primer
ataatgtaaagaa

SEQ ID NO: 1773 - DNA, 13 bp, Artificial Sequence
  Description of Artificial Sequence: Synthetic primer
gtgtggctccaat

SEQ ID NO: 1774 - DNA, 13 bp, Artificial Sequence
  Description of Artificial Sequence: Synthetic primer
tttcattgatttg

SEQ ID NO: 1775 - DNA, 13 bp, Artificial Sequence
  Description of Artificial Sequence: Synthetic primer
tgtcataaatcaa

SEQ ID NO: 1776 - DNA, 13 bp, Artificial Sequence
  Description of Artificial Sequence: Synthetic primer
tcgtaatgcgttg

SEQ ID NO: 1777 - DNA, 13 bp, Artificial Sequence
  Description of Artificial Sequence: Synthetic primer
cctctttttcagt

SEQ ID NO: 1778 - DNA, 13 bp, Artificial Sequence
  Description of Artificial Sequence: Synthetic primer
ttgggataagtta

SEQ ID NO: 1779 - DNA, 13 bp, Artificial Sequence
  Description of Artificial Sequence: Synthetic primer
acctccgcattaa

SEQ ID NO: 1780 - DNA, 13 bp, Artificial Sequence
  Description of Artificial Sequence: Synthetic primer
tcattagctgctc

SEQ ID NO: 1781 - DNA, 13 bp, Artificial Sequence
  Description of Artificial Sequence: Synthetic primer
catcaacacagtc

SEQ ID NO: 1782 - DNA, 13 bp, Artificial Sequence
  Description of Artificial Sequence: Synthetic primer
aaactttgcattc

SEQ ID NO: 1783 - DNA, 13 bp, Artificial Sequence
  Description of Artificial Sequence: Synthetic primer
ccgttcagtgcca

SEQ ID NO: 1784 - DNA, 13 bp, Artificial Sequence
  Description of Artificial Sequence: Synthetic primer
ttcccagggttct

SEQ ID NO: 1785 - DNA, 13 bp, Artificial Sequence
  Description of Artificial Sequence: Synthetic primer
gcatggcagcaag

SEQ ID NO: 1786 - DNA, 13 bp, Artificial Sequence
  Description of Artificial Sequence: Synthetic primer
agtttttcttaat

SEQ ID NO: 1787 - DNA, 13 bp, Artificial Sequence
  Description of Artificial Sequence: Synthetic primer
tttgcaatcgctt

SEQ ID NO: 1788 - DNA, 13 bp, Artificial Sequence
  Description of Artificial Sequence: Synthetic primer
agtccttcaatcc

SEQ ID NO: 1789 - DNA, 13 bp, Artificial Sequence
  Description of Artificial Sequence: Synthetic primer
ggtagtagatact

SEQ ID NO: 1790 - DNA, 13 bp, Artificial Sequence
  Description of Artificial Sequence: Synthetic primer
tgatgatattgca

SEQ ID NO: 1791 - DNA, 13 bp, Artificial Sequence
  Description of Artificial Sequence: Synthetic primer
gaatgctgtctgg

SEQ ID NO: 1792 - DNA, 13 bp, Artificial Sequence
  Description of Artificial Sequence: Synthetic primer
gatgtgtacagac

SEQ ID NO: 1793 - DNA, 13 bp, Artificial Sequence
  Description of Artificial Sequence: Synthetic primer
gtcttgcttggtg

SEQ ID NO: 1794 - DNA, 13 bp, Artificial Sequence
  Description of Artificial Sequence: Synthetic primer
agtaattccctat

SEQ ID NO: 1795 - DNA, 13 bp, Artificial Sequence
  Description of Artificial Sequence: Synthetic primer
tttttagtttccc

SEQ ID NO: 1796 - DNA, 13 bp, Artificial Sequence
  Description of Artificial Sequence: Synthetic primer
tccaagtcacact

SEQ ID NO: 1797 - DNA, 13 bp, Artificial Sequence
  Description of Artificial Sequence: Synthetic primer
gtaaaagaatggg

SEQ ID NO: 1798 - DNA, 13 bp, Artificial Sequence
  Description of Artificial Sequence: Synthetic primer
agcacaatggttc

SEQ ID NO: 1799 - DNA, 13 bp, Artificial Sequence
  Description of Artificial Sequence: Synthetic primer
ttgtagaatcaag

SEQ ID NO: 1800 - DNA, 13 bp, Artificial Sequence
  Description of Artificial Sequence: Synthetic primer
gagattcagtcca

SEQ ID NO: 1801 - DNA, 13 bp, Artificial Sequence
  Description of Artificial Sequence: Synthetic primer
aatcacttttatt

SEQ ID NO: 1802 - DNA, 13 bp, Artificial Sequence
  Description of Artificial Sequence: Synthetic primer
aattagggcacat

SEQ ID NO: 1803 - DNA, 13 bp, Artificial Sequence
  Description of Artificial Sequence: Synthetic primer
atggtatccaggc

SEQ ID NO: 1804 - DNA, 13 bp, Artificial Sequence
  Description of Artificial Sequence: Synthetic primer
caacctcgaacaa

SEQ ID NO: 1805 - DNA, 13 bp, Artificial Sequence
  Description of Artificial Sequence: Synthetic primer
gaatgtacaaatg

SEQ ID NO: 1806 - DNA, 13 bp, Artificial Sequence
  Description of Artificial Sequence: Synthetic primer
gatcaattttgtc

SEQ ID NO: 1807 - DNA, 13 bp, Artificial Sequence
  Description of Artificial Sequence: Synthetic primer
aagcacctttagt

SEQ ID NO: 1808 - DNA, 13 bp, Artificial Sequence
  Description of Artificial Sequence: Synthetic primer
ttcctgatacttt

SEQ ID NO: 1809 - DNA, 13 bp, Artificial Sequence
  Description of Artificial Sequence: Synthetic primer
ttgtaagggtgtc

SEQ ID NO: 1810 - DNA, 13 bp, Artificial Sequence
  Description of Artificial Sequence: Synthetic primer
tgtggcaagggtt

SEQ ID NO: 1811 - DNA, 13 bp, Artificial Sequence
  Description of Artificial Sequence: Synthetic primer
tgctcaacgttta

SEQ ID NO: 1812 - DNA, 13 bp, Artificial Sequence
  Description of Artificial Sequence: Synthetic primer
ggtgatgagtgtt

SEQ ID NO: 1813 - DNA, 13 bp, Artificial Sequence
  Description of Artificial Sequence: Synthetic primer
tttcttctgtcat

SEQ ID NO: 1814 - DNA, 13 bp, Artificial Sequence
  Description of Artificial Sequence: Synthetic primer
ttagggttgttga

SEQ ID NO: 1815 - DNA, 13 bp, Artificial Sequence
  Description of Artificial Sequence: Synthetic primer
ggtcctgatcttg

SEQ ID NO: 1816 - DNA, 13 bp, Artificial Sequence
  Description of Artificial Sequence: Synthetic primer
tctttcggaggga

SEQ ID NO: 1817 - DNA, 13 bp, Artificial Sequence
  Description of Artificial Sequence: Synthetic primer
caacttgagttgc

SEQ ID NO: 1818 - DNA, 13 bp, Artificial Sequence
  Description of Artificial Sequence: Synthetic primer
gactcctttcgtt

SEQ ID NO: 1819 - DNA, 13 bp, Artificial Sequence
  Description of Artificial Sequence: Synthetic primer
caatatccttcta

SEQ ID NO: 1820 - DNA, 13 bp, Artificial Sequence
  Description of Artificial Sequence: Synthetic primer
tttttcttaacct

SEQ ID NO: 1821 - DNA, 13 bp, Artificial Sequence
  Description of Artificial Sequence: Synthetic primer
gtgttatcaacca

SEQ ID NO: 1822 - DNA, 13 bp, Artificial Sequence
  Description of Artificial Sequence: Synthetic primer
ttactagacaaaa

SEQ ID NO: 1823 - DNA, 13 bp, Artificial Sequence
  Description of Artificial Sequence: Synthetic primer
aaatttttgtgtg

SEQ ID NO: 1824 - DNA, 13 bp, Artificial Sequence
  Description of Artificial Sequence: Synthetic primer
cttaattatcatt

SEQ ID NO: 1825 - DNA, 13 bp, Artificial Sequence
  Description of Artificial Sequence: Synthetic primer
atcctttttgcaa

SEQ ID NO: 1826 - DNA, 13 bp, Artificial Sequence
  Description of Artificial Sequence: Synthetic primer
tatcatacctctt

SEQ ID NO: 1827 - DNA, 13 bp, Artificial Sequence
  Description of Artificial Sequence: Synthetic primer
tgaagcttatttt

SEQ ID NO: 1828 - DNA, 13 bp, Artificial Sequence
  Description of Artificial Sequence: Synthetic primer
ggacacacaaaaa

SEQ ID NO: 1829 - DNA, 13 bp, Artificial Sequence
  Description of Artificial Sequence: Synthetic primer
tgtattgtgaatt

SEQ ID NO: 1830 - DNA, 13 bp, Artificial Sequence
  Description of Artificial Sequence: Synthetic primer
gtttcagcatcca

SEQ ID NO: 1831 - DNA, 13 bp, Artificial Sequence
  Description of Artificial Sequence: Synthetic primer
tatctagtctgct

SEQ ID NO: 1832 - DNA, 13 bp, Artificial Sequence
  Description of Artificial Sequence: Synthetic primer
tttttattttccc

SEQ ID NO: 1833 - DNA, 13 bp, Artificial Sequence
  Description of Artificial Sequence: Synthetic primer
gaccaagtcgatt

SEQ ID NO: 1834 - DNA, 13 bp, Artificial Sequence
  Description of Artificial Sequence: Synthetic primer
gtctcctcttcag

SEQ ID NO: 1835 - DNA, 13 bp, Artificial Sequence
  Description of Artificial Sequence: Synthetic primer
acaaagtcaattg

SEQ ID NO: 1836 - DNA, 13 bp, Artificial Sequence
  Description of Artificial Sequence: Synthetic primer
ctaaatagttatt

SEQ ID NO: 1837 - DNA, 13 bp, Artificial Sequence
  Description of Artificial Sequence: Synthetic primer
tgtccaatcatgt

SEQ ID NO: 1838 - DNA, 13 bp, Artificial Sequence
  Description of Artificial Sequence: Synthetic primer
agattggctcaaa

SEQ ID NO: 1839 - DNA, 13 bp, Artificial Sequence
  Description of Artificial Sequence: Synthetic primer
tgttgaactccat

SEQ ID NO: 1840 - DNA, 13 bp, Artificial Sequence
  Description of Artificial Sequence: Synthetic primer
ttgactccagaaa

SEQ ID NO: 1841 - DNA, 13 bp, Artificial Sequence
  Description of Artificial Sequence: Synthetic primer
tccgttttgttat

SEQ ID NO: 1842 - DNA, 13 bp, Artificial Sequence
  Description of Artificial Sequence: Synthetic primer
aagcaatgacaat

SEQ ID NO: 1843 - DNA, 13 bp, Artificial Sequence
  Description of Artificial Sequence: Synthetic primer
taccagtcagttg

SEQ ID NO: 1844 - DNA, 13 bp, Artificial Sequence
  Description of Artificial Sequence: Synthetic primer
ggatgcccccaat

SEQ ID NO: 1845 - DNA, 13 bp, Artificial Sequence
  Description of Artificial Sequence: Synthetic primer
tgatagaattccc

SEQ ID NO: 1846 - DNA, 13 bp, Artificial Sequence
  Description of Artificial Sequence: Synthetic primer
cctgagtgtacga

SEQ ID NO: 1847 - DNA, 13 bp, Artificial Sequence
  Description of Artificial Sequence: Synthetic primer
aaccgctgttgtt

SEQ ID NO: 1848 - DNA, 13 bp, Artificial Sequence
  Description of Artificial Sequence: Synthetic primer
ttccttgggcttt

SEQ ID NO: 1849 - DNA, 13 bp, Artificial Sequence
  Description of Artificial Sequence: Synthetic primer
agtacgggatcca

SEQ ID NO: 1850 - DNA, 13 bp, Artificial Sequence
  Description of Artificial Sequence: Synthetic primer
gagcaccaaaatt

SEQ ID NO: 1851 - DNA, 13 bp, Artificial Sequence
  Description of Artificial Sequence: Synthetic primer
ctgtcgaattctg

SEQ ID NO: 1852 - DNA, 13 bp, Artificial Sequence
  Description of Artificial Sequence: Synthetic primer
tcagctggtcagt

SEQ ID NO: 1853 - DNA, 13 bp, Artificial Sequence
  Description of Artificial Sequence: Synthetic primer
tggtggagatctg

SEQ ID NO: 1854 - DNA, 13 bp, Artificial Sequence
  Description of Artificial Sequence: Synthetic primer
ggtgatgatgttg

SEQ ID NO: 1855 - DNA, 13 bp, Artificial Sequence
  Description of Artificial Sequence: Synthetic primer
tcaatgccttaat

SEQ ID NO: 1856 - DNA, 13 bp, Artificial Sequence
  Description of Artificial Sequence: Synthetic primer
atatgttttggta

SEQ ID NO: 1857 - DNA, 13 bp, Artificial Sequence
  Description of Artificial Sequence: Synthetic primer
ggaaccttctcat

SEQ ID NO: 1858 - DNA, 13 bp, Artificial Sequence
  Description of Artificial Sequence: Synthetic primer
gtggatgaagatt

SEQ ID NO: 1859 - DNA, 13 bp, Artificial Sequence
  Description of Artificial Sequence: Synthetic primer
ttgaacaagtgtg

SEQ ID NO: 1860 - DNA, 13 bp, Artificial Sequence
  Description of Artificial Sequence: Synthetic primer
atcctcgtagtca

SEQ ID NO: 1861 - DNA, 13 bp, Artificial Sequence
  Description of Artificial Sequence: Synthetic primer
tatgaactagggc

SEQ ID NO: 1862 - DNA, 13 bp, Artificial Sequence
  Description of Artificial Sequence: Synthetic primer
gaagtagaacggg

SEQ ID NO: 1863 - DNA, 13 bp, Artificial Sequence
  Description of Artificial Sequence: Synthetic primer
gattttgtggact

SEQ ID NO: 1864 - DNA, 13 bp, Artificial Sequence
  Description of Artificial Sequence: Synthetic primer
atctagatttagc

SEQ ID NO: 1865 - DNA, 13 bp, Artificial Sequence
  Description of Artificial Sequence: Synthetic primer
tcacctgcagtcc

SEQ ID NO: 1866 - DNA, 13 bp, Artificial Sequence
  Description of Artificial Sequence: Synthetic primer
gattattttgtac

SEQ ID NO: 1867 - DNA, 13 bp, Artificial Sequence
  Description of Artificial Sequence: Synthetic primer
gagcttatttata

SEQ ID NO: 1868 - DNA, 13 bp, Artificial Sequence
  Description of Artificial Sequence: Synthetic primer
agatttgaagagc

SEQ ID NO: 1869 - DNA, 13 bp, Artificial Sequence
  Description of Artificial Sequence: Synthetic primer
gaagcccctcaat

SEQ ID NO: 1870 - DNA, 13 bp, Artificial Sequence
  Description of Artificial Sequence: Synthetic primer
gtctgtgacaaaa

SEQ ID NO: 1871 - DNA, 13 bp, Artificial Sequence
  Description of Artificial Sequence: Synthetic primer
tgttttgatttct

SEQ ID NO: 1872 - DNA, 13 bp, Artificial Sequence
  Description of Artificial Sequence: Synthetic primer
gattctggggcaa

SEQ ID NO: 1873 - DNA, 13 bp, Artificial Sequence
  Description of Artificial Sequence: Synthetic primer
ttatgaccatagt

SEQ ID NO: 1874 - DNA, 13 bp, Artificial Sequence
  Description of Artificial Sequence: Synthetic primer
ttgtaatcttttc

SEQ ID NO: 1875 - DNA, 13 bp, Artificial Sequence
  Description of Artificial Sequence: Synthetic primer
gttgctgtgttac

SEQ ID NO: 1876 - DNA, 13 bp, Artificial Sequence
  Description of Artificial Sequence: Synthetic primer
ccctattaactgt

SEQ ID NO: 1877 - DNA, 13 bp, Artificial Sequence
  Description of Artificial Sequence: Synthetic primer
tgctgagtagttc

SEQ ID NO: 1878 - DNA, 13 bp, Artificial Sequence
  Description of Artificial Sequence: Synthetic primer
accagataacgat

SEQ ID NO: 1879 - DNA, 13 bp, Artificial Sequence
  Description of Artificial Sequence: Synthetic primer
atcgcaaaatgag

SEQ ID NO: 1880 - DNA, 13 bp, Artificial Sequence
  Description of Artificial Sequence: Synthetic primer
aattgcaatttag

SEQ ID NO: 1881 - DNA, 13 bp, Artificial Sequence
  Description of Artificial Sequence: Synthetic primer
gaatttccgcact

SEQ ID NO: 1882 - DNA, 13 bp, Artificial Sequence
  Description of Artificial Sequence: Synthetic primer
ggcttaatagcgg

SEQ ID NO: 1883 - DNA, 13 bp, Artificial Sequence
  Description of Artificial Sequence: Synthetic primer
cttcttaacgccg

SEQ ID NO: 1884 - DNA, 13 bp, Artificial Sequence
  Description of Artificial Sequence: Synthetic primer
gattataatcagt

SEQ ID NO: 1885 - DNA, 13 bp, Artificial Sequence
  Description of Artificial Sequence: Synthetic primer
ttactccttcctg

SEQ ID NO: 1886 - DNA, 13 bp, Artificial Sequence
  Description of Artificial Sequence: Synthetic primer
gcctgatatcact

SEQ ID NO: 1887 - DNA, 13 bp, Artificial Sequence
  Description of Artificial Sequence: Synthetic primer
tttcagaaccttg

SEQ ID NO: 1888 - DNA, 13 bp, Artificial Sequence
  Description of Artificial Sequence: Synthetic primer
cagaaaaccagcc

SEQ ID NO: 1889 - DNA, 13 bp, Artificial Sequence
  Description of Artificial Sequence: Synthetic primer
taagaagtgggtt

SEQ ID NO: 1890 - DNA, 13 bp, Artificial Sequence
  Description of Artificial Sequence: Synthetic primer
attgccttgtggt

SEQ ID NO: 1891 - DNA, 13 bp, Artificial Sequence
  Description of Artificial Sequence: Synthetic primer
atggaatcttagg

SEQ ID NO: 1892 - DNA, 13 bp, Artificial Sequence
  Description of Artificial Sequence: Synthetic primer
ccttggactatct

SEQ ID NO: 1893 - DNA, 13 bp, Artificial Sequence
  Description of Artificial Sequence: Synthetic primer
ttacagggatact

SEQ ID NO: 1894 - DNA, 13 bp, Artificial Sequence
  Description of Artificial Sequence: Synthetic primer
tcccatagtatat

SEQ ID NO: 1895 - DNA, 13 bp, Artificial Sequence
  Description of Artificial Sequence: Synthetic primer
atcttaaaaacaa

SEQ ID NO: 1896 - DNA, 13 bp, Artificial Sequence
  Description of Artificial Sequence: Synthetic primer
cttgcatattgtt

SEQ ID NO: 1897 - DNA, 13 bp, Artificial Sequence
  Description of Artificial Sequence: Synthetic primer
agatatgtttcgg

SEQ ID NO: 1898 - DNA, 13 bp, Artificial Sequence
  Description of Artificial Sequence: Synthetic primer
tcccgttcggatc

SEQ ID NO: 1899 - DNA, 13 bp, Artificial Sequence
  Description of Artificial Sequence: Synthetic primer
ttaagctggcctc

SEQ ID NO: 1900 - DNA, 13 bp, Artificial Sequence
  Description of Artificial Sequence: Synthetic primer
ttaattttcctgg

SEQ ID NO: 1901 - DNA, 13 bp, Artificial Sequence
  Description of Artificial Sequence: Synthetic primer
tagaaatgtatca

SEQ ID NO: 1902 - DNA, 13 bp, Artificial Sequence
  Description of Artificial Sequence: Synthetic primer
agatgaaggtaag

SEQ ID NO: 1903 - DNA, 13 bp, Artificial Sequence
  Description of Artificial Sequence: Synthetic primer
atttgagaaggag

SEQ ID NO: 1904 - DNA, 13 bp, Artificial Sequence
  Description of Artificial Sequence: Synthetic primer
gtctcatctggtt

SEQ ID NO: 1905 - DNA, 13 bp, Artificial Sequence
  Description of Artificial Sequence: Synthetic primer
gctaccatatgca

SEQ ID NO: 1906 - DNA, 13 bp, Artificial Sequence
  Description of Artificial Sequence: Synthetic primer
gcactattccatc

SEQ ID NO: 1907 - DNA, 13 bp, Artificial Sequence
  Description of Artificial Sequence: Synthetic primer
tgcggagtttatt

SEQ ID NO: 1908 - DNA, 13 bp, Artificial Sequence
  Description of Artificial Sequence: Synthetic primer
gtatgtgtgccca

SEQ ID NO: 1909 - DNA, 13 bp, Artificial Sequence
  Description of Artificial Sequence: Synthetic primer
gataccagtcctt

SEQ ID NO: 1910 - DNA, 13 bp, Artificial Sequence
  Description of Artificial Sequence: Synthetic primer
aatgtttgcattt

SEQ ID NO: 1911 - DNA, 13 bp, Artificial Sequence
  Description of Artificial Sequence: Synthetic primer
gctgcccaatctt

SEQ ID NO: 1912 - DNA, 13 bp, Artificial Sequence
  Description of Artificial Sequence: Synthetic primer
catgatgactgtg

SEQ ID NO: 1913 - DNA, 13 bp, Artificial Sequence
  Description of Artificial Sequence: Synthetic primer
agacctctactgt

SEQ ID NO: 1914 - DNA, 13 bp, Artificial Sequence
  Description of Artificial Sequence: Synthetic primer
caattatgcatat

SEQ ID NO: 1915 - DNA, 13 bp, Artificial Sequence
  Description of Artificial Sequence: Synthetic primer
acacctaatctct

SEQ ID NO: 1916 - DNA, 13 bp, Artificial Sequence
  Description of Artificial Sequence: Synthetic primer
tataaccttctga

SEQ ID NO: 1917 - DNA, 13 bp, Artificial Sequence
  Description of Artificial Sequence: Synthetic primer
gacaatgtaaaaa

SEQ ID NO: 1918 - DNA, 13 bp, Artificial Sequence
  Description of Artificial Sequence: Synthetic primer
ctgaaataacaac

SEQ ID NO: 1919 - DNA, 13 bp, Artificial Sequence
  Description of Artificial Sequence: Synthetic primer
tgcctctaacagt

SEQ ID NO: 1920 - DNA, 13 bp, Artificial Sequence
  Description of Artificial Sequence: Synthetic primer
acctgtagagacc

SEQ ID NO: 1921 - DNA, 13 bp, Artificial Sequence
  Description of Artificial Sequence: Synthetic primer
cccttaggatggg

SEQ ID NO: 1922 - DNA, 13 bp, Artificial Sequence
  Description of Artificial Sequence: Synthetic primer
agtgtataatata

SEQ ID NO: 1923 - DNA, 13 bp, Artificial Sequence
  Description of Artificial Sequence: Synthetic primer
ttctgcgagtaga

SEQ ID NO: 1924 - DNA, 13 bp, Artificial Sequence
  Description of Artificial Sequence: Synthetic primer
ttgtcagtaatgt

SEQ ID NO: 1925 - DNA, 13 bp, Artificial Sequence
  Description of Artificial Sequence: Synthetic primer
ctttgtggaaagc

SEQ ID NO: 1926 - DNA, 13 bp, Artificial Sequence
  Description of Artificial Sequence: Synthetic primer
ggtgtgcggtgtt

SEQ ID NO: 1927 - DNA, 13 bp, Artificial Sequence
  Description of Artificial Sequence: Synthetic primer
ttgaaccaggaac

SEQ ID NO: 1928 - DNA, 13 bp, Artificial Sequence
  Description of Artificial Sequence: Synthetic primer
ccttctagattaa

SEQ ID NO: 1929 - DNA, 13 bp, Artificial Sequence
  Description of Artificial Sequence: Synthetic primer
attccctctgctg

SEQ ID NO: 1930 - DNA, 13 bp, Artificial Sequence
  Description of Artificial Sequence: Synthetic primer
aaacagaaagtta

SEQ ID NO: 1931 - DNA, 13 bp, Artificial Sequence
  Description of Artificial Sequence: Synthetic primer
atgtcaattgggt

SEQ ID NO: 1932 - DNA, 13 bp, Artificial Sequence
  Description of Artificial Sequence: Synthetic primer
gagaaagaaaaat

SEQ ID NO: 1933 - DNA, 13 bp, Artificial Sequence
  Description of Artificial Sequence: Synthetic primer
catcttgcgggag

SEQ ID NO: 1934 - DNA, 13 bp, Artificial Sequence
  Description of Artificial Sequence: Synthetic primer
gttaaactttcta

SEQ ID NO: 1935 - DNA, 13 bp, Artificial Sequence
  Description of Artificial Sequence: Synthetic primer
atggaatccatgc

SEQ ID NO: 1936 - DNA, 13 bp, Artificial Sequence
  Description of Artificial Sequence: Synthetic primer
cctttattaaatc

SEQ ID NO: 1937 - DNA, 13 bp, Artificial Sequence
  Description of Artificial Sequence: Synthetic primer
aatttttcctgac

SEQ ID NO: 1938 - DNA, 13 bp, Artificial Sequence
  Description of Artificial Sequence: Synthetic primer
taagtctcgtatc

SEQ ID NO: 1939 - DNA, 13 bp, Artificial Sequence
  Description of Artificial Sequence: Synthetic primer
caaaaacaagaga

SEQ ID NO: 1940 - DNA, 13 bp, Artificial Sequence
  Description of Artificial Sequence: Synthetic primer
cattaagaaaaag

SEQ ID NO: 1941 - DNA, 13 bp, Artificial Sequence
  Description of Artificial Sequence: Synthetic primer
actagattctcag

SEQ ID NO: 1942 - DNA, 13 bp, Artificial Sequence
  Description of Artificial Sequence: Synthetic primer
tcatctttctgcc

SEQ ID NO: 1943 - DNA, 13 bp, Artificial Sequence
  Description of Artificial Sequence: Synthetic primer
aagctttatgatc

SEQ ID NO: 1944 - DNA, 13 bp, Artificial Sequence
  Description of Artificial Sequence: Synthetic primer
atgcatgtcagtg

SEQ ID NO: 1945 - DNA, 13 bp, Artificial Sequence
  Description of Artificial Sequence: Synthetic primer
tttggaatagcag

SEQ ID NO: 1946 - DNA, 13 bp, Artificial Sequence
  Description of Artificial Sequence: Synthetic primer
taaatattggaca

SEQ ID NO: 1947 - DNA, 13 bp, Artificial Sequence
  Description of Artificial Sequence: Synthetic primer
tgattaagaaaaa

SEQ ID NO: 1948 - DNA, 13 bp, Artificial Sequence
  Description of Artificial Sequence: Synthetic primer
ctgcagaaattga

SEQ ID NO: 1949 - DNA, 13 bp, Artificial Sequence
  Description of Artificial Sequence: Synthetic primer
cgaagaacattaa

SEQ ID NO: 1950 - DNA, 13 bp, Artificial Sequence
  Description of Artificial Sequence: Synthetic primer
actttattaaaac

SEQ ID NO: 1951 - DNA, 13 bp, Artificial Sequence
  Description of Artificial Sequence: Synthetic primer
gaaaaagtcccag

SEQ ID NO: 1952 - DNA, 13 bp, Artificial Sequence
  Description of Artificial Sequence: Synthetic primer
aagaaaccatata

SEQ ID NO: 1953 - DNA, 13 bp, Artificial Sequence
  Description of Artificial Sequence: Synthetic primer
acctgattgttgc

SEQ ID NO: 1954 - DNA, 13 bp, Artificial Sequence
  Description of Artificial Sequence: Synthetic primer
aaaaccacacatg

SEQ ID NO: 1955 - DNA, 13 bp, Artificial Sequence
  Description of Artificial Sequence: Synthetic primer
acattggctggtg

SEQ ID NO: 1956 - DNA, 13 bp, Artificial Sequence
  Description of Artificial Sequence: Synthetic primer
agcataaatcttg

SEQ ID NO: 1957 - DNA, 13 bp, Artificial Sequence
  Description of Artificial Sequence: Synthetic primer
cagtctttttctc

SEQ ID NO: 1958 - DNA, 13 bp, Artificial Sequence
  Description of Artificial Sequence: Synthetic primer
acttgattcagag

SEQ ID NO: 1959 - DNA, 13 bp, Artificial Sequence
  Description of Artificial Sequence: Synthetic primer
ttgctttgaagga

SEQ ID NO: 1960 - DNA, 13 bp, Artificial Sequence
  Description of Artificial Sequence: Synthetic primer
tcctcttctcaat

SEQ ID NO: 1961 - DNA, 13 bp, Artificial Sequence
  Description of Artificial Sequence: Synthetic primer
gatgggttaataa

SEQ ID NO: 1962 - DNA, 13 bp, Artificial Sequence
  Description of Artificial Sequence: Synthetic primer
cttcctaatatgc

SEQ ID NO: 1963 - DNA, 13 bp, Artificial Sequence
  Description of Artificial Sequence: Synthetic primer
atacaggtattca

SEQ ID NO: 1964 - DNA, 13 bp, Artificial Sequence
  Description of Artificial Sequence: Synthetic primer
tcagatttaacat

SEQ ID NO: 1965 - DNA, 13 bp, Artificial Sequence
  Description of Artificial Sequence: Synthetic primer
gacaacagatcat

SEQ ID NO: 1966 - DNA, 13 bp, Artificial Sequence
  Description of Artificial Sequence: Synthetic primer
ctctttctaaagg

SEQ ID NO: 1967 - DNA, 13 bp, Artificial Sequence
  Description of Artificial Sequence: Synthetic primer
atagatcaagtgt

SEQ ID NO: 1968 - DNA, 13 bp, Artificial Sequence
  Description of Artificial Sequence: Synthetic primer
cattccctagtaa

SEQ ID NO: 1969 - DNA, 13 bp, Artificial Sequence
  Description of Artificial Sequence: Synthetic primer
actattaatttag

SEQ ID NO: 1970 - DNA, 13 bp, Artificial Sequence
  Description of Artificial Sequence: Synthetic primer
taatattgaacaa

SEQ ID NO: 1971 - DNA, 13 bp, Artificial Sequence
  Description of Artificial Sequence: Synthetic primer
tccagtgataaga

SEQ ID NO: 1972 - DNA, 13 bp, Artificial Sequence
  Description of Artificial Sequence: Synthetic primer
gctttactttcct

SEQ ID NO: 1973 - DNA, 13 bp, Artificial Sequence
  Description of Artificial Sequence: Synthetic primer
tttgagagaggaa

SEQ ID NO: 1974 - DNA, 13 bp, Artificial Sequence
  Description of Artificial Sequence: Synthetic primer
gctactgagccct

SEQ ID NO: 1975 - DNA, 13 bp, Artificial Sequence
  Description of Artificial Sequence: Synthetic primer
gtagtttaaattt

SEQ ID NO: 1976 - DNA, 13 bp, Artificial Sequence
  Description of Artificial Sequence: Synthetic primer
cttgaactcagtg

SEQ ID NO: 1977 - DNA, 13 bp, Artificial Sequence
  Description of Artificial Sequence: Synthetic primer
agaatactccttt

SEQ ID NO: 1978 - DNA, 13 bp, Artificial Sequence
  Description of Artificial Sequence: Synthetic primer
gtttgaatgtcag

SEQ ID NO: 1979 - DNA, 13 bp, Artificial Sequence
  Description of Artificial Sequence: Synthetic primer
atcctaaatgcaa

SEQ ID NO: 1980 - DNA, 13 bp, Artificial Sequence
  Description of Artificial Sequence: Synthetic primer
cttgaagacatag

SEQ ID NO: 1981 - DNA, 13 bp, Artificial Sequence
  Description of Artificial Sequence: Synthetic primer
aatgggaaggaca

SEQ ID NO: 1982 - DNA, 13 bp, Artificial Sequence
  Description of Artificial Sequence: Synthetic primer
ctgattatcctcc

SEQ ID NO: 1983 - DNA, 13 bp, Artificial Sequence
  Description of Artificial Sequence: Synthetic primer
attgacatatctg

SEQ ID NO: 1984 - DNA, 13 bp, Artificial Sequence
  Description of Artificial Sequence: Synthetic primer
cacataataatgt

SEQ ID NO: 1985 - DNA, 13 bp, Artificial Sequence
  Description of Artificial Sequence: Synthetic primer
ttgatcttccacc

SEQ ID NO: 1986 - DNA, 13 bp, Artificial Sequence
  Description of Artificial Sequence: Synthetic primer
atgatttatctga

SEQ ID NO: 1987 - DNA, 13 bp, Artificial Sequence
  Description of Artificial Sequence: Synthetic primer
agctagtcaagta

SEQ ID NO: 1988 - DNA, 13 bp, Artificial Sequence
  Description of Artificial Sequence: Synthetic primer
cctgatgcaaggt

SEQ ID NO: 1989 - DNA, 13 bp, Artificial Sequence
  Description of Artificial Sequence: Synthetic primer
tggtgatccccag

SEQ ID NO: 1990 - DNA, 13 bp, Artificial Sequence
  Description of Artificial Sequence: Synthetic primer
ctttcctttatcc

SEQ ID NO: 1991 - DNA, 13 bp, Artificial Sequence
  Description of Artificial Sequence: Synthetic primer
attatcaagagaa

SEQ ID NO: 1992 - DNA, 13 bp, Artificial Sequence
  Description of Artificial Sequence: Synthetic primer
caatgacacagag

SEQ ID NO: 1993 - DNA, 13 bp, Artificial Sequence
  Description of Artificial Sequence: Synthetic primer
cctgttagatttc

SEQ ID NO: 1994 - DNA, 13 bp, Artificial Sequence
  Description of Artificial Sequence: Synthetic primer
gtgtgagtggctt

SEQ ID NO: 1995 - DNA, 13 bp, Artificial Sequence
  Description of Artificial Sequence: Synthetic primer
gtgtcatgatccc

SEQ ID NO: 1996 - DNA, 13 bp, Artificial Sequence
  Description of Artificial Sequence: Synthetic primer
gtgttgaacatta

SEQ ID NO: 1997 - DNA, 13 bp, Artificial Sequence
  Description of Artificial Sequence: Synthetic primer
caaccccaaaatg

SEQ ID NO: 1998 - DNA, 13 bp, Artificial Sequence
  Description of Artificial Sequence: Synthetic primer
tatgtgggcaaaa

SEQ ID NO: 1999 - DNA, 13 bp, Artificial Sequence
  Description of Artificial Sequence: Synthetic primer
ggtctatttcaac

SEQ ID NO: 2000 - DNA, 13 bp, Artificial Sequence
  Description of Artificial Sequence: Synthetic primer
aatctatttaaaa

SEQ ID NO: 2001 - DNA, 13 bp, Artificial Sequence
  Description of Artificial Sequence: Synthetic primer
gggtgaatccttg

SEQ ID NO: 2002 - DNA, 13 bp, Artificial Sequence
  Description of Artificial Sequence: Synthetic primer
atttgtcagattc

SEQ ID NO: 2003 - DNA, 13 bp, Artificial Sequence
  Description of Artificial Sequence: Synthetic primer
aattcttacctct

SEQ ID NO: 2004 - DNA, 13 bp, Artificial Sequence
  Description of Artificial Sequence: Synthetic primer
acatttatcctta

SEQ ID NO: 2005 - DNA, 13 bp, Artificial Sequence
  Description of Artificial Sequence: Synthetic primer
acaaaacatgacc

SEQ ID NO: 2006 - DNA, 13 bp, Artificial Sequence
  Description of Artificial Sequence: Synthetic primer
ttcaactcttatt

SEQ ID NO: 2007 - DNA, 13 bp, Artificial Sequence
  Description of Artificial Sequence: Synthetic primer
aaacaccaccaat

SEQ ID NO: 2008 - DNA, 13 bp, Artificial Sequence
  Description of Artificial Sequence: Synthetic primer
ccctctactctga

SEQ ID NO: 2009 - DNA, 13 bp, Artificial Sequence
  Description of Artificial Sequence: Synthetic primer
ttttagatacaag

SEQ ID NO: 2010 - DNA, 13 bp, Artificial Sequence
  Description of Artificial Sequence: Synthetic primer
tcaactcaactga

SEQ ID NO: 2011 - DNA, 13 bp, Artificial Sequence
  Description of Artificial Sequence: Synthetic primer
tctgatgcggtca

SEQ ID NO: 2012 - DNA, 13 bp, Artificial Sequence
  Description of Artificial Sequence: Synthetic primer
tgaatattcaaac

SEQ ID NO: 2013 - DNA, 13 bp, Artificial Sequence
  Description of Artificial Sequence: Synthetic primer
tctggagaacagg

SEQ ID NO: 2014 - DNA, 13 bp, Artificial Sequence
  Description of Artificial Sequence: Synthetic primer
caaatttatttaa

SEQ ID NO: 2015 - DNA, 13 bp, Artificial Sequence
  Description of Artificial Sequence: Synthetic primer
cctctagatattc

SEQ ID NO: 2016 - DNA, 13 bp, Artificial Sequence
  Description of Artificial Sequence: Synthetic primer
aatttctcttatc

SEQ ID NO: 2017 - DNA, 13 bp, Artificial Sequence
  Description of Artificial Sequence: Synthetic primer
caacccttatcgc

SEQ ID NO: 2018 - DNA, 13 bp, Artificial Sequence
  Description of Artificial Sequence: Synthetic primer
ggtttgctgacgt

SEQ ID NO: 2019 - DNA, 13 bp, Artificial Sequence
  Description of Artificial Sequence: Synthetic primer
tttagtatcctat

SEQ ID NO: 2020 - DNA, 13 bp, Artificial Sequence
  Description of Artificial Sequence: Synthetic primer
tatttgtcaaatt

SEQ ID NO: 2021 - DNA, 13 bp, Artificial Sequence
  Description of Artificial Sequence: Synthetic primer
tgtgaatggcttt

SEQ ID NO: 2022 - DNA, 13 bp, Artificial Sequence
  Description of Artificial Sequence: Synthetic primer
agcaataattgat

SEQ ID NO: 2023 - DNA, 13 bp, Artificial Sequence
  Description of Artificial Sequence: Synthetic primer
agctggataccat

SEQ ID NO: 2024 - DNA, 13 bp, Artificial Sequence
  Description of Artificial Sequence: Synthetic primer
tttccttggagca

SEQ ID NO: 2025 - DNA, 13 bp, Artificial Sequence
  Description of Artificial Sequence: Synthetic primer
tttcacatttgat

SEQ ID NO: 2026 - DNA, 13 bp, Artificial Sequence
  Description of Artificial Sequence: Synthetic primer
tcagaactcataa

SEQ ID NO: 2027 - DNA, 13 bp, Artificial Sequence
  Description of Artificial Sequence: Synthetic primer
atcaccccagttg

SEQ ID NO: 2028 - DNA, 13 bp, Artificial Sequence
  Description of Artificial Sequence: Synthetic primer
attaccctaaatg

SEQ ID NO: 2029 - DNA, 13 bp, Artificial Sequence
  Description of Artificial Sequence: Synthetic primer
tcccaatgattat

SEQ ID NO: 2030 - DNA, 13 bp, Artificial Sequence
  Description of Artificial Sequence: Synthetic primer
cataattttagat

SEQ ID NO: 2031 - DNA, 13 bp, Artificial Sequence
  Description of Artificial Sequence: Synthetic primer
aaagggggccgat

SEQ ID NO: 2032 - DNA, 13 bp, Artificial Sequence
  Description of Artificial Sequence: Synthetic primer
gttttagaaattg

SEQ ID NO: 2033 - DNA, 13 bp, Artificial Sequence
  Description of Artificial Sequence: Synthetic primer
gattcccaggaac

SEQ ID NO: 2034 - DNA, 13 bp, Artificial Sequence
  Description of Artificial Sequence: Synthetic primer
atacaatccccct

SEQ ID NO: 2035 - DNA, 13 bp, Artificial Sequence
  Description of Artificial Sequence: Synthetic primer
aactcacagaaat

SEQ ID NO: 2036 - DNA, 13 bp, Artificial Sequence
  Description of Artificial Sequence: Synthetic primer
tatttcaactcag

SEQ ID NO: 2037 - DNA, 13 bp, Artificial Sequence
  Description of Artificial Sequence: Synthetic primer
tcatattataagg

SEQ ID NO: 2038 - DNA, 13 bp, Artificial Sequence
  Description of Artificial Sequence: Synthetic primer
tgtcatggcccca

SEQ ID NO: 2039 - DNA, 13 bp, Artificial Sequence
  Description of Artificial Sequence: Synthetic primer
tctaactattcaa

SEQ ID NO: 2040 - DNA, 13 bp, Artificial Sequence
  Description of Artificial Sequence: Synthetic primer
accaataatgata

SEQ ID NO: 2041 - DNA, 13 bp, Artificial Sequence
  Description of Artificial Sequence: Synthetic primer
attcaaagataat

SEQ ID NO: 2042 - DNA, 13 bp, Artificial Sequence
  Description of Artificial Sequence: Synthetic primer
tctttaaaaatta

SEQ ID NO: 2043 - DNA, 13 bp, Artificial Sequence
  Description of Artificial Sequence: Synthetic primer
cctttatcctaat

SEQ ID NO: 2044 - DNA, 13 bp, Artificial Sequence
  Description of Artificial Sequence: Synthetic primer
aaacattaaatgg

SEQ ID NO: 2045 - DNA, 13 bp, Artificial Sequence
  Description of Artificial Sequence: Synthetic primer
agatatttattct

SEQ ID NO: 2046 - DNA, 13 bp, Artificial Sequence
  Description of Artificial Sequence: Synthetic primer
aaggatattgaga

SEQ ID NO: 2047 - DNA, 13 bp, Artificial Sequence
  Description of Artificial Sequence: Synthetic primer
gtttggctttatt

SEQ ID NO: 2048 - DNA, 13 bp, Artificial Sequence
  Description of Artificial Sequence: Synthetic primer
ccttctgagtgtc

SEQ ID NO: 2049 - DNA, 13 bp, Artificial Sequence
  Description of Artificial Sequence: Synthetic primer
gacaaaatgtcaa

SEQ ID NO: 2050 - DNA, 13 bp, Artificial Sequence
  Description of Artificial Sequence: Synthetic primer
ttgagtctaaatg

SEQ ID NO: 2051 - DNA, 13 bp, Artificial Sequence
  Description of Artificial Sequence: Synthetic primer
ggtcgaagataat

SEQ ID NO: 2052 - DNA, 13 bp, Artificial Sequence
  Description of Artificial Sequence: Synthetic primer
gtaaatttaatca

SEQ ID NO: 2053 - DNA, 13 bp, Artificial Sequence
  Description of Artificial Sequence: Synthetic primer
agacacggcatat

SEQ ID NO: 2054 - DNA, 13 bp, Artificial Sequence
  Description of Artificial Sequence: Synthetic primer
atgatgatttgtc

SEQ ID NO: 2055 - DNA, 13 bp, Artificial Sequence
  Description of Artificial Sequence: Synthetic primer
ctccattatatgc

SEQ ID NO: 2056 - DNA, 13 bp, Artificial Sequence
  Description of Artificial Sequence: Synthetic primer
ttgtaagacttgt

SEQ ID NO: 2057 - DNA, 13 bp, Artificial Sequence
  Description of Artificial Sequence: Synthetic primer
agccctttgtcta

SEQ ID NO: 2058 - DNA, 13 bp, Artificial Sequence
  Description of Artificial Sequence: Synthetic primer
aaaatattaagac

SEQ ID NO: 2059 - DNA, 13 bp, Artificial Sequence
  Description of Artificial Sequence: Synthetic primer
tgagccaccctca

SEQ ID NO: 2060 - DNA, 13 bp, Artificial Sequence
  Description of Artificial Sequence: Synthetic primer
tcatgtcacttct

SEQ ID NO: 2061 - DNA, 13 bp, Artificial Sequence
  Description of Artificial Sequence: Synthetic primer
aaaatactatcaa

SEQ ID NO: 2062 - DNA, 13 bp, Artificial Sequence
  Description of Artificial Sequence: Synthetic primer
taatatggggttt

SEQ ID NO: 2063 - DNA, 13 bp, Artificial Sequence
  Description of Artificial Sequence: Synthetic primer
tgatggttgttac

SEQ ID NO: 2064 - DNA, 13 bp, Artificial Sequence
  Description of Artificial Sequence: Synthetic primer
acacacagagcac

SEQ ID NO: 2065 - DNA, 13 bp, Artificial Sequence
  Description of Artificial Sequence: Synthetic primer
atcaattaagaac

SEQ ID NO: 2066 - DNA, 13 bp, Artificial Sequence
  Description of Artificial Sequence: Synthetic primer
tcaggtgtttggt

SEQ ID NO: 2067 - DNA, 13 bp, Artificial Sequence
  Description of Artificial Sequence: Synthetic primer
atcattgtgcctt

SEQ ID NO: 2068 - DNA, 13 bp, Artificial Sequence
  Description of Artificial Sequence: Synthetic primer
tacacaggtattc

SEQ ID NO: 2069 - DNA, 13 bp, Artificial Sequence
  Description of Artificial Sequence: Synthetic primer
ttgttgagaccct

SEQ ID NO: 2070 - DNA, 13 bp, Artificial Sequence
  Description of Artificial Sequence: Synthetic primer
aaaacatgaccaa

SEQ ID NO: 2071 - DNA, 13 bp, Artificial Sequence
  Description of Artificial Sequence: Synthetic primer
agtagtgcagaaa

SEQ ID NO: 2072 - DNA, 13 bp, Artificial Sequence
  Description of Artificial Sequence: Synthetic primer
ctttccaaagggc

SEQ ID NO: 2073 - DNA, 13 bp, Artificial Sequence
  Description of Artificial Sequence: Synthetic primer
aacatagaaaaca

SEQ ID NO: 2074 - DNA, 13 bp, Artificial Sequence
  Description of Artificial Sequence: Synthetic primer
atataattactca

SEQ ID NO: 2075 - DNA, 13 bp, Artificial Sequence
  Description of Artificial Sequence: Synthetic primer
gagctttatcctt

SEQ ID NO: 2076 - DNA, 13 bp, Artificial Sequence
  Description of Artificial Sequence: Synthetic primer
ggaaggcgacatg

SEQ ID NO: 2077 - DNA, 13 bp, Artificial Sequence
  Description of Artificial Sequence: Synthetic primer
ctaagtaaactca

SEQ ID NO: 2078 - DNA, 13 bp, Artificial Sequence
  Description of Artificial Sequence: Synthetic primer
tctgcataagaag

SEQ ID NO: 2079 - DNA, 13 bp, Artificial Sequence
  Description of Artificial Sequence: Synthetic primer
aattgcttattcc

SEQ ID NO: 2080 - DNA, 13 bp, Artificial Sequence
  Description of Artificial Sequence: Synthetic primer
tcacaaaaacaat

SEQ ID NO: 2081 - DNA, 13 bp, Artificial Sequence
  Description of Artificial Sequence: Synthetic primer
agatcaagaattg

SEQ ID NO: 2082 - DNA, 13 bp, Artificial Sequence
  Description of Artificial Sequence: Synthetic primer
ctcagttggatac

SEQ ID NO: 2083 - DNA, 13 bp, Artificial Sequence
  Description of Artificial Sequence: Synthetic primer
gatagctagtaac

SEQ ID NO: 2084 - DNA, 13 bp, Artificial Sequence
  Description of Artificial Sequence: Synthetic primer
agaccatcttaat

SEQ ID NO: 2085 - DNA, 13 bp, Artificial Sequence
  Description of Artificial Sequence: Synthetic primer
ccaaaacttgtcg

SEQ ID NO: 2086 - DNA, 13 bp, Artificial Sequence
  Description of Artificial Sequence: Synthetic primer
aaatagtataaat

SEQ ID NO: 2087 - DNA, 13 bp, Artificial Sequence
  Description of Artificial Sequence: Synthetic primer
catgacttgattc

SEQ ID NO: 2088 - DNA, 13 bp, Artificial Sequence
  Description of Artificial Sequence: Synthetic primer
taccggaacataa

SEQ ID NO: 2089 - DNA, 13 bp, Artificial Sequence
  Description of Artificial Sequence: Synthetic primer
ggctctcaaaaga

SEQ ID NO: 2090 - DNA, 13 bp, Artificial Sequence
  Description of Artificial Sequence: Synthetic primer
tggggaacaggaa

SEQ ID NO: 2091 - DNA, 13 bp, Artificial Sequence
  Description of Artificial Sequence: Synthetic primer
acccgattgttgc

SEQ ID NO: 2092 - DNA, 13 bp, Artificial Sequence
  Description of Artificial Sequence: Synthetic primer
tgttttgtgttac

SEQ ID NO: 2093 - DNA, 13 bp, Artificial Sequence
  Description of Artificial Sequence: Synthetic primer
taattcttttcta

SEQ ID NO: 2094 - DNA, 13 bp, Artificial Sequence
  Description of Artificial Sequence: Synthetic primer
cttgcacgtggat

SEQ ID NO: 2095 - DNA, 13 bp, Artificial Sequence
  Description of Artificial Sequence: Synthetic primer
ttacacttatatt

SEQ ID NO: 2096 - DNA, 13 bp, Artificial Sequence
  Description of Artificial Sequence: Synthetic primer
ttgttatacattg

SEQ ID NO: 2097 - DNA, 13 bp, Artificial Sequence
  Description of Artificial Sequence: Synthetic primer
gacctgtcaccaa

SEQ ID NO: 2098 - DNA, 13 bp, Artificial Sequence
  Description of Artificial Sequence: Synthetic primer
ccttgagtcaccc

SEQ ID NO: 2099 - DNA, 13 bp, Artificial Sequence
  Description of Artificial Sequence: Synthetic primer
agctgaggataga

SEQ ID NO: 2100 - DNA, 13 bp, Artificial Sequence
  Description of Artificial Sequence: Synthetic primer
ttattattctatt

SEQ ID NO: 2101 - DNA, 13 bp, Artificial Sequence
  Description of Artificial Sequence: Synthetic primer
tcatttacaacat

SEQ ID NO: 2102 - DNA, 13 bp, Artificial Sequence
  Description of Artificial Sequence: Synthetic primer
ctgtcccaacact

SEQ ID NO: 2103 - DNA, 13 bp, Artificial Sequence
  Description of Artificial Sequence: Synthetic primer
ctctccaataatt

SEQ ID NO: 2104 - DNA, 13 bp, Artificial Sequence
  Description of Artificial Sequence: Synthetic primer
ctgcatcacaatc

SEQ ID NO: 2105 - DNA, 13 bp, Artificial Sequence
  Description of Artificial Sequence: Synthetic primer
gattatattacta

SEQ ID NO: 2106 - DNA, 13 bp, Artificial Sequence
  Description of Artificial Sequence: Synthetic primer
agtgtttggacat

SEQ ID NO: 2107 - DNA, 13 bp, Artificial Sequence
  Description of Artificial Sequence: Synthetic primer
gattaattgcatc

SEQ ID NO: 2108 - DNA, 13 bp, Artificial Sequence
  Description of Artificial Sequence: Synthetic primer
gaaatgtttagtg

SEQ ID NO: 2109 - DNA, 13 bp, Artificial Sequence
  Description of Artificial Sequence: Synthetic primer
accctctttgtcc

SEQ ID NO: 2110 - DNA, 13 bp, Artificial Sequence
  Description of Artificial Sequence: Synthetic primer
caaatggatcatt

SEQ ID NO: 2111 - DNA, 13 bp, Artificial Sequence
  Description of Artificial Sequence: Synthetic primer
gcctgagcattct

SEQ ID NO: 2112 - DNA, 13 bp, Artificial Sequence
  Description of Artificial Sequence: Synthetic primer
ccttgtccttgcc

SEQ ID NO: 2113 - DNA, 13 bp, Artificial Sequence
  Description of Artificial Sequence: Synthetic primer
tgattatcctcat

SEQ ID NO: 2114 - DNA, 13 bp, Artificial Sequence
  Description of Artificial Sequence: Synthetic primer
cttttccagtcat

SEQ ID NO: 2115 - DNA, 13 bp, Artificial Sequence
  Description of Artificial Sequence: Synthetic primer
gtattggggagca

SEQ ID NO: 2116 - DNA, 13 bp, Artificial Sequence
  Description of Artificial Sequence: Synthetic primer
tcatcataatatg

SEQ ID NO: 2117 - DNA, 13 bp, Artificial Sequence
  Description of Artificial Sequence: Synthetic primer
agggagagttttt

SEQ ID NO: 2118 - DNA, 13 bp, Artificial Sequence
  Description of Artificial Sequence: Synthetic primer
ctaataaaaacac

SEQ ID NO: 2119 - DNA, 13 bp, Artificial Sequence
  Description of Artificial Sequence: Synthetic primer
agtaagaagtcaa

SEQ ID NO: 2120 - DNA, 13 bp, Artificial Sequence
  Description of Artificial Sequence: Synthetic primer
actctgcctaatc

SEQ ID NO: 2121 - DNA, 13 bp, Artificial Sequence
  Description of Artificial Sequence: Synthetic primer
ctatcaaaacaag

SEQ ID NO: 2122 - DNA, 13 bp, Artificial Sequence
  Description of Artificial Sequence: Synthetic primer
gcttgttgggcaa

SEQ ID NO: 2123 - DNA, 13 bp, Artificial Sequence
  Description of Artificial Sequence: Synthetic primer
aggattcacttaa

SEQ ID NO: 2124 - DNA, 13 bp, Artificial Sequence
  Description of Artificial Sequence: Synthetic primer
aacagttaattat

SEQ ID NO: 2125 - DNA, 13 bp, Artificial Sequence
  Description of Artificial Sequence: Synthetic primer
attcttcacacca

SEQ ID NO: 2126 - DNA, 13 bp, Artificial Sequence
  Description of Artificial Sequence: Synthetic primer
tctgagattcagt

SEQ ID NO: 2127 - DNA, 13 bp, Artificial Sequence
  Description of Artificial Sequence: Synthetic primer
aacttgctgtaag

SEQ ID NO: 2128 - DNA, 13 bp, Artificial Sequence
  Description of Artificial Sequence: Synthetic primer
gataaccctccta

SEQ ID NO: 2129 - DNA, 13 bp, Artificial Sequence
  Description of Artificial Sequence: Synthetic primer
ataatgattcttt

SEQ ID NO: 2130 - DNA, 13 bp, Artificial Sequence
  Description of Artificial Sequence: Synthetic primer
cttagaggtacaa

SEQ ID NO: 2131 - DNA, 13 bp, Artificial Sequence
  Description of Artificial Sequence: Synthetic primer
cttaatttcatca

SEQ ID NO: 2132 - DNA, 13 bp, Artificial Sequence
  Description of Artificial Sequence: Synthetic primer
catgttcctcccc

SEQ ID NO: 2133 - DNA, 13 bp, Artificial Sequence
  Description of Artificial Sequence: Synthetic primer
tacgacaaataca

SEQ ID NO: 2134 - DNA, 13 bp, Artificial Sequence
  Description of Artificial Sequence: Synthetic primer
actttaatatatc

SEQ ID NO: 2135 - DNA, 13 bp, Artificial Sequence
  Description of Artificial Sequence: Synthetic primer
gcaagttgtaacg

SEQ ID NO: 2136 - DNA, 13 bp, Artificial Sequence
  Description of Artificial Sequence: Synthetic primer
tacctctcaatga

SEQ ID NO: 2137 - DNA, 13 bp, Artificial Sequence
  Description of Artificial Sequence: Synthetic primer
atacagcagtgtt

SEQ ID NO: 2138 - DNA, 13 bp, Artificial Sequence
  Description of Artificial Sequence: Synthetic primer
actattaagttag

SEQ ID NO: 2139 - DNA, 13 bp, Artificial Sequence
  Description of Artificial Sequence: Synthetic primer
aagatatattttg

SEQ ID NO: 2140 - DNA, 13 bp, Artificial Sequence
  Description of Artificial Sequence: Synthetic primer
aaatgaagttctc

SEQ ID NO: 2141 - DNA, 13 bp, Artificial Sequence
  Description of Artificial Sequence: Synthetic primer
tgagtgggtgtgc

SEQ ID NO: 2142 - DNA, 13 bp, Artificial Sequence
  Description of Artificial Sequence: Synthetic primer
acggttctataat

SEQ ID NO: 2143 - DNA, 13 bp, Artificial Sequence
  Description of Artificial Sequence: Synthetic primer
ttggtcttgcggg

SEQ ID NO: 2144 - DNA, 13 bp, Artificial Sequence
  Description of Artificial Sequence: Synthetic primer
gctcaatttcatg

SEQ ID NO: 2145 - DNA, 13 bp, Artificial Sequence
  Description of Artificial Sequence: Synthetic primer
gttggattcgcat

SEQ ID NO: 2146 - DNA, 13 bp, Artificial Sequence
  Description of Artificial Sequence: Synthetic primer
agatttttataat

SEQ ID NO: 2147 - DNA, 13 bp, Artificial Sequence
  Description of Artificial Sequence: Synthetic primer
tcctcatcatcac

SEQ ID NO: 2148 - DNA, 13 bp, Artificial Sequence
  Description of Artificial Sequence: Synthetic primer
ttatacaacattc

SEQ ID NO: 2149 - DNA, 13 bp, Artificial Sequence
  Description of Artificial Sequence: Synthetic primer
tcgacaattttcg

SEQ ID NO: 2150 - DNA, 13 bp, Artificial Sequence
  Description of Artificial Sequence: Synthetic primer
tgagagtcagttg

SEQ ID NO: 2151 - DNA, 13 bp, Artificial Sequence
  Description of Artificial Sequence: Synthetic primer
ctttaaattaacc

SEQ ID NO: 2152 - DNA, 13 bp, Artificial Sequence
  Description of Artificial Sequence: Synthetic primer
gcagacattccct

SEQ ID NO: 2153 - DNA, 13 bp, Artificial Sequence
  Description of Artificial Sequence: Synthetic primer
aagggtccacacc

SEQ ID NO: 2154 - DNA, 13 bp, Artificial Sequence
  Description of Artificial Sequence: Synthetic primer
agtcatacggcaa

SEQ ID NO: 2155 - DNA, 13 bp, Artificial Sequence
  Description of Artificial Sequence: Synthetic primer
catgctaatttaa

SEQ ID NO: 2156 - DNA, 13 bp, Artificial Sequence
  Description of Artificial Sequence: Synthetic primer
tcacttgtcatca

SEQ ID NO: 2157 - DNA, 13 bp, Artificial Sequence
  Description of Artificial Sequence: Synthetic primer
caaaactgagcaa

SEQ ID NO: 2158 - DNA, 13 bp, Artificial Sequence
  Description of Artificial Sequence: Synthetic primer
aagtcgttaatga

SEQ ID NO: 2159 - DNA, 13 bp, Artificial Sequence
  Description of Artificial Sequence: Synthetic primer
caataatcactgt

SEQ ID NO: 2160 - DNA, 13 bp, Artificial Sequence
  Description of Artificial Sequence: Synthetic primer
tgttgagtagtcg

SEQ ID NO: 2161 - DNA, 13 bp, Artificial Sequence
  Description of Artificial Sequence: Synthetic primer
gttgtcaataaat

SEQ ID NO: 2162 - DNA, 13 bp, Artificial Sequence
  Description of Artificial Sequence: Synthetic primer
aaatactccttcc

SEQ ID NO: 2163 - DNA, 13 bp, Artificial Sequence
  Description of Artificial Sequence: Synthetic primer
ctaaatagttacc

SEQ ID NO: 2164 - DNA, 13 bp, Artificial Sequence
  Description of Artificial Sequence: Synthetic primer
tcagagtggataa

SEQ ID NO: 2165 - DNA, 13 bp, Artificial Sequence
  Description of Artificial Sequence: Synthetic primer
atagcaattttgc

SEQ ID NO: 2166 - DNA, 13 bp, Artificial Sequence
  Description of Artificial Sequence: Synthetic primer
atacaagatgttg

SEQ ID NO: 2167 - DNA, 13 bp, Artificial Sequence
  Description of Artificial Sequence: Synthetic primer
actttgtattaag

SEQ ID NO: 2168 - DNA, 13 bp, Artificial Sequence
  Description of Artificial Sequence: Synthetic primer
gaaccttgaagat

SEQ ID NO: 2169 - DNA, 13 bp, Artificial Sequence
  Description of Artificial Sequence: Synthetic primer
tatctatgttata

SEQ ID NO: 2170 - DNA, 13 bp, Artificial Sequence
  Description of Artificial Sequence: Synthetic primer
actgatcatctag

SEQ ID NO: 2171 - DNA, 13 bp, Artificial Sequence
  Description of Artificial Sequence: Synthetic primer
atcattgtccttt

SEQ ID NO: 2172 - DNA, 13 bp, Artificial Sequence
  Description of Artificial Sequence: Synthetic primer
ataaggtcctcat

SEQ ID NO: 2173 - DNA, 13 bp, Artificial Sequence
  Description of Artificial Sequence: Synthetic primer
attctgtcatagt

SEQ ID NO: 2174 - DNA, 13 bp, Artificial Sequence
  Description of Artificial Sequence: Synthetic primer
agatcctcaaagc

SEQ ID NO: 2175 - DNA, 13 bp, Artificial Sequence
  Description of Artificial Sequence: Synthetic primer
actgaaattattg

SEQ ID NO: 2176 - DNA, 13 bp, Artificial Sequence
  Description of Artificial Sequence: Synthetic primer
aagttgtaacgtg

SEQ ID NO: 2177 - DNA, 13 bp, Artificial Sequence
  Description of Artificial Sequence: Synthetic primer
cctgagaatcagt

SEQ ID NO: 2178 - DNA, 13 bp, Artificial Sequence
  Description of Artificial Sequence: Synthetic primer
ataccaaaaagag

SEQ ID NO: 2179 - DNA, 13 bp, Artificial Sequence
  Description of Artificial Sequence: Synthetic primer
ccttgcatgttcc

SEQ ID NO: 2180 - DNA, 13 bp, Artificial Sequence
  Description of Artificial Sequence: Synthetic primer
ctttaatcatgat

SEQ ID NO: 2181 - DNA, 13 bp, Artificial Sequence
  Description of Artificial Sequence: Synthetic primer
tcattgtaatact

SEQ ID NO: 2182 - DNA, 13 bp, Artificial Sequence
  Description of Artificial Sequence: Synthetic primer
ttagtgaagatac

SEQ ID NO: 2183 - DNA, 13 bp, Artificial Sequence
  Description of Artificial Sequence: Synthetic primer
cctattgtatttt

SEQ ID NO: 2184 - DNA, 13 bp, Artificial Sequence
  Description of Artificial Sequence: Synthetic primer
cttggtttccttc

SEQ ID NO: 2185 - DNA, 13 bp, Artificial Sequence
  Description of Artificial Sequence: Synthetic primer
atactgctcataa

SEQ ID NO: 2186 - DNA, 13 bp, Artificial Sequence
  Description of Artificial Sequence: Synthetic primer
taacaataattat

SEQ ID NO: 2187 - DNA, 13 bp, Artificial Sequence
  Description of Artificial Sequence: Synthetic primer
ctccccctttgag

SEQ ID NO: 2188 - DNA, 13 bp, Artificial Sequence
  Description of Artificial Sequence: Synthetic primer
aacttttggctgg

SEQ ID NO: 2189 - DNA, 13 bp, Artificial Sequence
  Description of Artificial Sequence: Synthetic primer
cgtactgcaataa

SEQ ID NO: 2190 - DNA, 13 bp, Artificial Sequence
  Description of Artificial Sequence: Synthetic primer
agtactgaggttg

SEQ ID NO: 2191 - DNA, 13 bp, Artificial Sequence
  Description of Artificial Sequence: Synthetic primer
tttttaacaccgt

SEQ ID NO: 2192 - DNA, 13 bp, Artificial Sequence
  Description of Artificial Sequence: Synthetic primer
tattagattagct

SEQ ID NO: 2193 - DNA, 13 bp, Artificial Sequence
  Description of Artificial Sequence: Synthetic primer
acccaattatctt

SEQ ID NO: 2194 - DNA, 13 bp, Artificial Sequence
  Description of Artificial Sequence: Synthetic primer
gtaaataaatgag

SEQ ID NO: 2195 - DNA, 13 bp, Artificial Sequence
  Description of Artificial Sequence: Synthetic primer
ttctccgggttta

SEQ ID NO: 2196 - DNA, 13 bp, Artificial Sequence
  Description of Artificial Sequence: Synthetic primer
tattgaagaatat

SEQ ID NO: 2197 - DNA, 13 bp, Artificial Sequence
  Description of Artificial Sequence: Synthetic primer
tcatatctattac

SEQ ID NO: 2198 - DNA, 13 bp, Artificial Sequence
  Description of Artificial Sequence: Synthetic primer
accatttatcacg

SEQ ID NO: 2199 - DNA, 13 bp, Artificial Sequence
  Description of Artificial Sequence: Synthetic primer
ataaacttaaaga

SEQ ID NO: 2200 - DNA, 13 bp, Artificial Sequence
  Description of Artificial Sequence: Synthetic primer
aagtcaatcatta

SEQ ID NO: 2201 - DNA, 13 bp, Artificial Sequence
  Description of Artificial Sequence: Synthetic primer
ctacttgaattta

SEQ ID NO: 2202 - DNA, 13 bp, Artificial Sequence
  Description of Artificial Sequence: Synthetic primer
ctcttaatctcat

SEQ ID NO: 2203 - DNA, 13 bp, Artificial Sequence
  Description of Artificial Sequence: Synthetic primer
gaatacttaagca

SEQ ID NO: 2204 - DNA, 13 bp, Artificial Sequence
  Description of Artificial Sequence: Synthetic primer
aagataaggattt

SEQ ID NO: 2205 - DNA, 13 bp, Artificial Sequence
  Description of Artificial Sequence: Synthetic primer
catttcgcttagg

SEQ ID NO: 2206 - DNA, 13 bp, Artificial Sequence
  Description of Artificial Sequence: Synthetic primer
atagaaacacagg

SEQ ID NO: 2207 - DNA, 13 bp, Artificial Sequence
  Description of Artificial Sequence: Synthetic primer
aatcttcccttta

SEQ ID NO: 2208 - DNA, 13 bp, Artificial Sequence
  Description of Artificial Sequence: Synthetic primer
gcacaattaaaaa

SEQ ID NO: 2209 - DNA, 13 bp, Artificial Sequence
  Description of Artificial Sequence: Synthetic primer
catttttaaccat

SEQ ID NO: 2210 - DNA, 13 bp, Artificial Sequence
  Description of Artificial Sequence: Synthetic primer
ttgcatccaaaag

SEQ ID NO: 2211 - DNA, 13 bp, Artificial Sequence
  Description of Artificial Sequence: Synthetic primer
ttttatcacttat

SEQ ID NO: 2212 - DNA, 13 bp, Artificial Sequence
  Description of Artificial Sequence: Synthetic primer
taagattggaata

SEQ ID NO: 2213 - DNA, 13 bp, Artificial Sequence
  Description of Artificial Sequence: Synthetic primer
tcatatggcaaaa

SEQ ID NO: 2214 - DNA, 13 bp, Artificial Sequence
  Description of Artificial Sequence: Synthetic primer
attcttaaaaagt

SEQ ID NO: 2215 - DNA, 13 bp, Artificial Sequence
  Description of Artificial Sequence: Synthetic primer
tatcgaagtggat

SEQ ID NO: 2216 - DNA, 13 bp, Artificial Sequence
  Description of Artificial Sequence: Synthetic primer
agaattgattgct

SEQ ID NO: 2217 - DNA, 13 bp, Artificial Sequence
  Description of Artificial Sequence: Synthetic primer
ggtgttgttagta

SEQ ID NO: 2218 - DNA, 13 bp, Artificial Sequence
  Description of Artificial Sequence: Synthetic primer
tccttccagtaaa

SEQ ID NO: 2219 - DNA, 13 bp, Artificial Sequence
  Description of Artificial Sequence: Synthetic primer
gaattgtttataa

SEQ ID NO: 2220 - DNA, 13 bp, Artificial Sequence
  Description of Artificial Sequence: Synthetic primer
atcaataatgttt

SEQ ID NO: 2221 - DNA, 13 bp, Artificial Sequence
  Description of Artificial Sequence: Synthetic primer
ttatgagcaataa

SEQ ID NO: 2222 - DNA, 13 bp, Artificial Sequence
  Description of Artificial Sequence: Synthetic primer
ccttcatagtcta

SEQ ID NO: 2223 - DNA, 13 bp, Artificial Sequence
  Description of Artificial Sequence: Synthetic primer
taaccgtgctgtg

SEQ ID NO: 2224 - DNA, 13 bp, Artificial Sequence
  Description of Artificial Sequence: Synthetic primer
tctcctgagagtc

SEQ ID NO: 2225 - DNA, 13 bp, Artificial Sequence
  Description of Artificial Sequence: Synthetic primer
cataatatgattt

SEQ ID NO: 2226 - DNA, 13 bp, Artificial Sequence
  Description of Artificial Sequence: Synthetic primer
gaattaagacaag

SEQ ID NO: 2227 - DNA, 13 bp, Artificial Sequence
  Description of Artificial Sequence: Synthetic primer
ctttgatggtcga

SEQ ID NO: 2228 - DNA, 13 bp, Artificial Sequence
  Description of Artificial Sequence: Synthetic primer
taagaccgataaa

SEQ ID NO: 2229 - DNA, 13 bp, Artificial Sequence
  Description of Artificial Sequence: Synthetic primer
tgaaaccatccac

SEQ ID NO: 2230 - DNA, 13 bp, Artificial Sequence
  Description of Artificial Sequence: Synthetic primer
atttttgtgctga

SEQ ID NO: 2231 - DNA, 13 bp, Artificial Sequence
  Description of Artificial Sequence: Synthetic primer
ataacgtagtttt

SEQ ID NO: 2232 - DNA, 13 bp, Artificial Sequence
  Description of Artificial Sequence: Synthetic primer
ctatctcatttga

SEQ ID NO: 2233 - DNA, 13 bp, Artificial Sequence
  Description of Artificial Sequence: Synthetic primer
atccttcaagatt

SEQ ID NO: 2234 - DNA, 13 bp, Artificial Sequence
  Description of Artificial Sequence: Synthetic primer
ttgaattaagata

SEQ ID NO: 2235 - DNA, 13 bp, Artificial Sequence
  Description of Artificial Sequence: Synthetic primer
ttgttgcatgtat

SEQ ID NO: 2236 - DNA, 13 bp, Artificial Sequence
  Description of Artificial Sequence: Synthetic primer
tattagggagcat

SEQ ID NO: 2237 - DNA, 13 bp, Artificial Sequence
  Description of Artificial Sequence: Synthetic primer
tgaggtcctcatc

SEQ ID NO: 2238 - DNA, 13 bp, Artificial Sequence
  Description of Artificial Sequence: Synthetic primer
atcaaagatagag

SEQ ID NO: 2239 - DNA, 13 bp, Artificial Sequence
  Description of Artificial Sequence: Synthetic primer
cgcgcatattgag

SEQ ID NO: 2240 - DNA, 13 bp, Artificial Sequence
  Description of Artificial Sequence: Synthetic primer
atcctaggcaatt

SEQ ID NO: 2241 - DNA, 13 bp, Artificial Sequence
  Description of Artificial Sequence: Synthetic primer
acatataatccca

SEQ ID NO: 2242 - DNA, 13 bp, Artificial Sequence
  Description of Artificial Sequence: Synthetic primer
tttgaaagttgga

SEQ ID NO: 2243 - DNA, 13 bp, Artificial Sequence
  Description of Artificial Sequence: Synthetic primer
ggtgaccatttca

SEQ ID NO: 2244 - DNA, 13 bp, Artificial Sequence
  Description of Artificial Sequence: Synthetic primer
taatcataatcct

SEQ ID NO: 2245 - DNA, 13 bp, Artificial Sequence
  Description of Artificial Sequence: Synthetic primer
aagagctgctggt

SEQ ID NO: 2246 - DNA, 13 bp, Artificial Sequence
  Description of Artificial Sequence: Synthetic primer
ttattgcttcaga

SEQ ID NO: 2247 - DNA, 13 bp, Artificial Sequence
  Description of Artificial Sequence: Synthetic primer
agtgtccttgttg

SEQ ID NO: 2248 - DNA, 13 bp, Artificial Sequence
  Description of Artificial Sequence: Synthetic primer
tcaagatcagata

SEQ ID NO: 2249 - DNA, 13 bp, Artificial Sequence
  Description of Artificial Sequence: Synthetic primer
ttgatgccaacag

SEQ ID NO: 2250 - DNA, 13 bp, Artificial Sequence
  Description of Artificial Sequence: Synthetic primer
ccagttgaattat

SEQ ID NO: 2251 - DNA, 13 bp, Artificial Sequence
  Description of Artificial Sequence: Synthetic primer
acactcacaaaac

SEQ ID NO: 2252 - DNA, 13 bp, Artificial Sequence
  Description of Artificial Sequence: Synthetic primer
agaactcttggca

SEQ ID NO: 2253 - DNA, 13 bp, Artificial Sequence
  Description of Artificial Sequence: Synthetic primer
tcactcatgtagt

SEQ ID NO: 2254 - DNA, 13 bp, Artificial Sequence
  Description of Artificial Sequence: Synthetic primer
gaaacaccaggct

SEQ ID NO: 2255 - DNA, 13 bp, Artificial Sequence
  Description of Artificial Sequence: Synthetic primer
catcataaacatc

SEQ ID NO: 2256 - DNA, 13 bp, Artificial Sequence
  Description of Artificial Sequence: Synthetic primer
tggtttgagaaca

SEQ ID NO: 2257 - DNA, 13 bp, Artificial Sequence
  Description of Artificial Sequence: Synthetic primer
cacatataagaga

SEQ ID NO: 2258 - DNA, 13 bp, Artificial Sequence
  Description of Artificial Sequence: Synthetic primer
ttgactgaatcat

SEQ ID NO: 2259 - DNA, 13 bp, Artificial Sequence
  Description of Artificial Sequence: Synthetic primer
gtaatgatgttgt

SEQ ID NO: 2260 - DNA, 13 bp, Artificial Sequence
  Description of Artificial Sequence: Synthetic primer
aaatcttgatctt

SEQ ID NO: 2261 - DNA, 13 bp, Artificial Sequence
  Description of Artificial Sequence: Synthetic primer
ctagaaattattt

SEQ ID NO: 2262 - DNA, 13 bp, Artificial Sequence
  Description of Artificial Sequence: Synthetic primer
agaaatcttcaag

SEQ ID NO: 2263 - DNA, 13 bp, Artificial Sequence
  Description of Artificial Sequence: Synthetic primer
ctgcatacaagaa

SEQ ID NO: 2264 - DNA, 13 bp, Artificial Sequence
  Description of Artificial Sequence: Synthetic primer
agtcaatctcaat

SEQ ID NO: 2265 - DNA, 13 bp, Artificial Sequence
  Description of Artificial Sequence: Synthetic primer
gtgaccacttcat

SEQ ID NO: 2266 - DNA, 13 bp, Artificial Sequence
  Description of Artificial Sequence: Synthetic primer
gtcctcttctgaa

SEQ ID NO: 2267 - DNA, 13 bp, Artificial Sequence
  Description of Artificial Sequence: Synthetic primer
acaaatggtctca

SEQ ID NO: 2268 - DNA, 13 bp, Artificial Sequence
  Description of Artificial Sequence: Synthetic primer
tgatcactcatat

SEQ ID NO: 2269 - DNA, 13 bp, Artificial Sequence
  Description of Artificial Sequence: Synthetic primer
tgatcaattgttc

SEQ ID NO: 2270 - DNA, 13 bp, Artificial Sequence
  Description of Artificial Sequence: Synthetic primer
acttaaaacactg

SEQ ID NO: 2271 - DNA, 13 bp, Artificial Sequence
  Description of Artificial Sequence: Synthetic primer
atcatctttgtca

SEQ ID NO: 2272 - DNA, 13 bp, Artificial Sequence
  Description of Artificial Sequence: Synthetic primer
aagaaatcttctg

SEQ ID NO: 2273 - DNA, 13 bp, Artificial Sequence
  Description of Artificial Sequence: Synthetic primer
tctataagtggta

SEQ ID NO: 2274 - DNA, 13 bp, Artificial Sequence
  Description of Artificial Sequence: Synthetic primer
gtctccaacagtc

SEQ ID NO: 2275 - DNA, 13 bp, Artificial Sequence
  Description of Artificial Sequence: Synthetic primer
tcatttattgatg

SEQ ID NO: 2276 - DNA, 13 bp, Artificial Sequence
  Description of Artificial Sequence: Synthetic primer
ccttggtggcatg

SEQ ID NO: 2277 - DNA, 13 bp, Artificial Sequence
  Description of Artificial Sequence: Synthetic primer
tcaaagaaatcct

SEQ ID NO: 2278 - DNA, 13 bp, Artificial Sequence
  Description of Artificial Sequence: Synthetic primer
tattcttggtcca

SEQ ID NO: 2279 - DNA, 13 bp, Artificial Sequence
  Description of Artificial Sequence: Synthetic primer
gcatacaaaaatc

SEQ ID NO: 2280 - DNA, 13 bp, Artificial Sequence
  Description of Artificial Sequence: Synthetic primer
tttttgttgactc

SEQ ID NO: 2281 - DNA, 13 bp, Artificial Sequence
  Description of Artificial Sequence: Synthetic primer
agtcctgcttgtt

SEQ ID NO: 2282 - DNA, 13 bp, Artificial Sequence
  Description of Artificial Sequence: Synthetic primer
tgtataacaggtg

SEQ ID NO: 2283 - DNA, 13 bp, Artificial Sequence
  Description of Artificial Sequence: Synthetic primer
ggtgctcactaga

SEQ ID NO: 2284 - DNA, 13 bp, Artificial Sequence
  Description of Artificial Sequence: Synthetic primer
atcacctccatat

SEQ ID NO: 2285 - DNA, 13 bp, Artificial Sequence
  Description of Artificial Sequence: Synthetic primer
agacttaaggttc

SEQ ID NO: 2286 - DNA, 13 bp, Artificial Sequence
  Description of Artificial Sequence: Synthetic primer
cacatgtaggaaa

SEQ ID NO: 2287 - DNA, 13 bp, Artificial Sequence
  Description of Artificial Sequence: Synthetic primer
acttactataaca

SEQ ID NO: 2288 - DNA, 13 bp, Artificial Sequence
  Description of Artificial Sequence: Synthetic primer
attgtggcgactc

SEQ ID NO: 2289 - DNA, 13 bp, Artificial Sequence
  Description of Artificial Sequence: Synthetic primer
cttctttgcatct

SEQ ID NO: 2290 - DNA, 13 bp, Artificial Sequence
  Description of Artificial Sequence: Synthetic primer
gatgcaatggaac

SEQ ID NO: 2291 - DNA, 13 bp, Artificial Sequence
  Description of Artificial Sequence: Synthetic primer
acttctttgaaac

SEQ ID NO: 2292 - DNA, 13 bp, Artificial Sequence
  Description of Artificial Sequence: Synthetic primer
catttgcgttgca

SEQ ID NO: 2293 - DNA, 13 bp, Artificial Sequence
  Description of Artificial Sequence: Synthetic primer
aatgacacatgta

SEQ ID NO: 2294 - DNA, 13 bp, Artificial Sequence
  Description of Artificial Sequence: Synthetic primer
ccccacttgctgt

SEQ ID NO: 2295 - DNA, 13 bp, Artificial Sequence
  Description of Artificial Sequence: Synthetic primer
ctccagcagtctg

SEQ ID NO: 2296 - DNA, 13 bp, Artificial Sequence
  Description of Artificial Sequence: Synthetic primer
ctgccgtctatca

SEQ ID NO: 2297 - DNA, 13 bp, Artificial Sequence
  Description of Artificial Sequence: Synthetic primer
ttgtattcatagt

SEQ ID NO: 2298 - DNA, 13 bp, Artificial Sequence
  Description of Artificial Sequence: Synthetic primer
tactgtagcagag

SEQ ID NO: 2299 - DNA, 13 bp, Artificial Sequence
  Description of Artificial Sequence: Synthetic primer
gattcttgactgt

SEQ ID NO: 2300 - DNA, 13 bp, Artificial Sequence
  Description of Artificial Sequence: Synthetic primer
gacttgaagcact

SEQ ID NO: 2301 - DNA, 13 bp, Artificial Sequence
  Description of Artificial Sequence: Synthetic primer
ttgttattgatgc

SEQ ID NO: 2302 - DNA, 13 bp, Artificial Sequence
  Description of Artificial Sequence: Synthetic primer
gatcctggtcatg

SEQ ID NO: 2303 - DNA, 13 bp, Artificial Sequence
  Description of Artificial Sequence: Synthetic primer
aaggacttctcct

SEQ ID NO: 2304 - DNA, 13 bp, Artificial Sequence
  Description of Artificial Sequence: Synthetic primer
tggtttccctttt

SEQ ID NO: 2305 - DNA, 13 bp, Artificial Sequence
  Description of Artificial Sequence: Synthetic primer
ctcgtaactgtcc

SEQ ID NO: 2306 - DNA, 13 bp, Artificial Sequence
  Description of Artificial Sequence: Synthetic primer
taaagctttgatt

SEQ ID NO: 2307 - DNA, 13 bp, Artificial Sequence
  Description of Artificial Sequence: Synthetic primer
gcgctgttaccat

SEQ ID NO: 2308 - DNA, 13 bp, Artificial Sequence
  Description of Artificial Sequence: Synthetic primer
actctgaaaggca

SEQ ID NO: 2309 - DNA, 13 bp, Artificial Sequence
  Description of Artificial Sequence: Synthetic primer
aattctagaatgg

SEQ ID NO: 2310 - DNA, 13 bp, Artificial Sequence
  Description of Artificial Sequence: Synthetic primer
tctcctgacaagt

SEQ ID NO: 2311 - DNA, 13 bp, Artificial Sequence
  Description of Artificial Sequence: Synthetic primer
aagtattcaaaga

SEQ ID NO: 2312 - DNA, 13 bp, Artificial Sequence
  Description of Artificial Sequence: Synthetic primer
ttcaagcagctca

SEQ ID NO: 2313 - DNA, 13 bp, Artificial Sequence
  Description of Artificial Sequence: Synthetic primer
aagaagacgtcat

SEQ ID NO: 2314 - DNA, 13 bp, Artificial Sequence
  Description of Artificial Sequence: Synthetic primer
tcttgtagtgaca

SEQ ID NO: 2315 - DNA, 13 bp, Artificial Sequence
  Description of Artificial Sequence: Synthetic primer
agcgttacatagt

SEQ ID NO: 2316 - DNA, 13 bp, Artificial Sequence
  Description of Artificial Sequence: Synthetic primer
agaaacttaatcc

SEQ ID NO: 2317 - DNA, 13 bp, Artificial Sequence
  Description of Artificial Sequence: Synthetic primer
agataaggctatg

SEQ ID NO: 2318 - DNA, 13 bp, Artificial Sequence
  Description of Artificial Sequence: Synthetic primer
tttgagcaataat

SEQ ID NO: 2319 - DNA, 13 bp, Artificial Sequence
  Description of Artificial Sequence: Synthetic primer
tagtgaatccctg

SEQ ID NO: 2320 - DNA, 13 bp, Artificial Sequence
  Description of Artificial Sequence: Synthetic primer
catcattgggccc

SEQ ID NO: 2321 - DNA, 13 bp, Artificial Sequence
  Description of Artificial Sequence: Synthetic primer
aagtcttcagtca

SEQ ID NO: 2322 - DNA, 13 bp, Artificial Sequence
  Description of Artificial Sequence: Synthetic primer
aatcaatctcaat

SEQ ID NO: 2323 - DNA, 13 bp, Artificial Sequence
  Description of Artificial Sequence: Synthetic primer
aaaactaaaatca

SEQ ID NO: 2324 - DNA, 13 bp, Artificial Sequence
  Description of Artificial Sequence: Synthetic primer
tcttgacaatatg

SEQ ID NO: 2325 - DNA, 13 bp, Artificial Sequence
  Description of Artificial Sequence: Synthetic primer
acttaaagcactg

SEQ ID NO: 2326 - DNA, 13 bp, Artificial Sequence
  Description of Artificial Sequence: Synthetic primer
aaactagacacaa

SEQ ID NO: 2327 - DNA, 13 bp, Artificial Sequence
  Description of Artificial Sequence: Synthetic primer
aatgcagatttgt

SEQ ID NO: 2328 - DNA, 13 bp, Artificial Sequence
  Description of Artificial Sequence: Synthetic primer
atttgcctttacg

SEQ ID NO: 2329 - DNA, 13 bp, Artificial Sequence
  Description of Artificial Sequence: Synthetic primer
ttactgtgatcca

SEQ ID NO: 2330 - DNA, 13 bp, Artificial Sequence
  Description of Artificial Sequence: Synthetic primer
tatcattaacact

SEQ ID NO: 2331 - DNA, 13 bp, Artificial Sequence
  Description of Artificial Sequence: Synthetic primer
tggttcgaaaaca

SEQ ID NO: 2332 - DNA, 13 bp, Artificial Sequence
  Description of Artificial Sequence: Synthetic primer
ttagtgaagagag

SEQ ID NO: 2333 - DNA, 13 bp, Artificial Sequence
  Description of Artificial Sequence: Synthetic primer
tcaggtcccactg

SEQ ID NO: 2334 - DNA, 13 bp, Artificial Sequence
  Description of Artificial Sequence: Synthetic primer
tcactcatgtaat

SEQ ID NO: 2335 - DNA, 13 bp, Artificial Sequence
  Description of Artificial Sequence: Synthetic primer
aatcaacctcaat

SEQ ID NO: 2336 - DNA, 13 bp, Artificial Sequence
  Description of Artificial Sequence: Synthetic primer
tggacttcagtgg

SEQ ID NO: 2337 - DNA, 13 bp, Artificial Sequence
  Description of Artificial Sequence: Synthetic primer
tttttgttgattc

SEQ ID NO: 2338 - DNA, 13 bp, Artificial Sequence
  Description of Artificial Sequence: Synthetic primer
gatcttgatcttg

SEQ ID NO: 2339 - DNA, 13 bp, Artificial Sequence
  Description of Artificial Sequence: Synthetic primer
tggcacatgtaag

SEQ ID NO: 2340 - DNA, 13 bp, Artificial Sequence
  Description of Artificial Sequence: Synthetic primer
aatgatgttctcc

SEQ ID NO: 2341 - DNA, 13 bp, Artificial Sequence
  Description of Artificial Sequence: Synthetic primer
tatgtccttgttg

SEQ ID NO: 2342 - DNA, 13 bp, Artificial Sequence
  Description of Artificial Sequence: Synthetic primer
ttgatttactata

SEQ ID NO: 2343 - DNA, 13 bp, Artificial Sequence
  Description of Artificial Sequence: Synthetic primer
cacatgtaatccc

SEQ ID NO: 2344 - DNA, 13 bp, Artificial Sequence
  Description of Artificial Sequence: Synthetic primer
tgtgttcacctga

SEQ ID NO: 2345 - DNA, 13 bp, Artificial Sequence
  Description of Artificial Sequence: Synthetic primer
cacatatagtccc

SEQ ID NO: 2346 - DNA, 13 bp, Artificial Sequence
  Description of Artificial Sequence: Synthetic primer
acctccaacagtc

SEQ ID NO: 2347 - DNA, 13 bp, Artificial Sequence
  Description of Artificial Sequence: Synthetic primer
ccctgatgacaac

SEQ ID NO: 2348 - DNA, 13 bp, Artificial Sequence
  Description of Artificial Sequence: Synthetic primer
tcctccaatgagt

SEQ ID NO: 2349 - DNA, 13 bp, Artificial Sequence
  Description of Artificial Sequence: Synthetic primer
ttgttgagaaggt

SEQ ID NO: 2350 - DNA, 13 bp, Artificial Sequence
  Description of Artificial Sequence: Synthetic primer
ttgagacaccagg

SEQ ID NO: 2351 - DNA, 13 bp, Artificial Sequence
  Description of Artificial Sequence: Synthetic primer
accatcaccttcc

SEQ ID NO: 2352 - DNA, 13 bp, Artificial Sequence
  Description of Artificial Sequence: Synthetic primer
acagatcaactgg

SEQ ID NO: 2353 - DNA, 13 bp, Artificial Sequence
  Description of Artificial Sequence: Synthetic primer
aacttaaggactg

SEQ ID NO: 2354 - DNA, 13 bp, Artificial Sequence
  Description of Artificial Sequence: Synthetic primer
gtaaaggatgcca

SEQ ID NO: 2355 - DNA, 13 bp, Artificial Sequence
  Description of Artificial Sequence: Synthetic primer
catcacaatcaag

SEQ ID NO: 2356 - DNA, 13 bp, Artificial Sequence
  Description of Artificial Sequence: Synthetic primer
aacttgaatctat

SEQ ID NO: 2357 - DNA, 13 bp, Artificial Sequence
  Description of Artificial Sequence: Synthetic primer
aggttcttttctg

SEQ ID NO: 2358 - DNA, 13 bp, Artificial Sequence
  Description of Artificial Sequence: Synthetic primer
gcaatcacttcct

SEQ ID NO: 2359 - DNA, 13 bp, Artificial Sequence
  Description of Artificial Sequence: Synthetic primer
ctgttattgactg

SEQ ID NO: 2360 - DNA, 13 bp, Artificial Sequence
  Description of Artificial Sequence: Synthetic primer
ttgatagcttcag

SEQ ID NO: 2361 - DNA, 13 bp, Artificial Sequence
  Description of Artificial Sequence: Synthetic primer
agaagtcttcaag

SEQ ID NO: 2362 - DNA, 13 bp, Artificial Sequence
  Description of Artificial Sequence: Synthetic primer
taagactgtggtg

SEQ ID NO: 2363 - DNA, 13 bp, Artificial Sequence
  Description of Artificial Sequence: Synthetic primer
tggtttgaaaaca

SEQ ID NO: 2364 - DNA, 13 bp, Artificial Sequence
  Description of Artificial Sequence: Synthetic primer
tatgttcttgttg

SEQ ID NO: 2365 - DNA, 13 bp, Artificial Sequence
  Description of Artificial Sequence: Synthetic primer
tcatataatagtg

SEQ ID NO: 2366 - DNA, 13 bp, Artificial Sequence
  Description of Artificial Sequence: Synthetic primer
caaccaaacctga

SEQ ID NO: 2367 - DNA, 13 bp, Artificial Sequence
  Description of Artificial Sequence: Synthetic primer
acttccatatcaa

SEQ ID NO: 2368 - DNA, 13 bp, Artificial Sequence
  Description of Artificial Sequence: Synthetic primer
aaagaagtcctca

SEQ ID NO: 2369 - DNA, 13 bp, Artificial Sequence
  Description of Artificial Sequence: Synthetic primer
acatatgattcaa

SEQ ID NO: 2370 - DNA, 13 bp, Artificial Sequence
  Description of Artificial Sequence: Synthetic primer
acatgtagtccca

SEQ ID NO: 2371 - DNA, 13 bp, Artificial Sequence
  Description of Artificial Sequence: Synthetic primer
acaacttggtatc

SEQ ID NO: 2372 - DNA, 13 bp, Artificial Sequence
  Description of Artificial Sequence: Synthetic primer
acagatgaacagg

SEQ ID NO: 2373 - DNA, 13 bp, Artificial Sequence
  Description of Artificial Sequence: Synthetic primer
tgaacctattagt

SEQ ID NO: 2374 - DNA, 13 bp, Artificial Sequence
  Description of Artificial Sequence: Synthetic primer
atggtgtaaatgt

SEQ ID NO: 2375 - DNA, 13 bp, Artificial Sequence
  Description of Artificial Sequence: Synthetic primer
ctcacataagact

SEQ ID NO: 2376 - DNA, 13 bp, Artificial Sequence
  Description of Artificial Sequence: Synthetic primer
tgttcacatccat

SEQ ID NO: 2377 - DNA, 13 bp, Artificial Sequence
  Description of Artificial Sequence: Synthetic primer
ctccaacaatctg

SEQ ID NO: 2378 - DNA, 13 bp, Artificial Sequence
  Description of Artificial Sequence: Synthetic primer
atgggaaacaagc

SEQ ID NO: 2379 - DNA, 13 bp, Artificial Sequence
  Description of Artificial Sequence: Synthetic primer
ctatgatccatgc

SEQ ID NO: 2380 - DNA, 13 bp, Artificial Sequence
  Description of Artificial Sequence: Synthetic primer
catacagaaatct

SEQ ID NO: 2381 - DNA, 13 bp, Artificial Sequence
  Description of Artificial Sequence: Synthetic primer
gaatttgattaca

SEQ ID NO: 2382 - DNA, 13 bp, Artificial Sequence
  Description of Artificial Sequence: Synthetic primer
tcatagtcctgtt

SEQ ID NO: 2383 - DNA, 13 bp, Artificial Sequence
  Description of Artificial Sequence: Synthetic primer
atgctatagaact

SEQ ID NO: 2384 - DNA, 13 bp, Artificial Sequence
  Description of Artificial Sequence: Synthetic primer
gctgaactcctcc

SEQ ID NO: 2385 - DNA, 13 bp, Artificial Sequence
  Description of Artificial Sequence: Synthetic primer
tcataatcctgct

SEQ ID NO: 2386 - DNA, 13 bp, Artificial Sequence
  Description of Artificial Sequence: Synthetic primer
cagatggggaaca

SEQ ID NO: 2387 - DNA, 13 bp, Artificial Sequence
  Description of Artificial Sequence: Synthetic primer
tcatctttgttaa

SEQ ID NO: 2388 - DNA, 13 bp, Artificial Sequence
  Description of Artificial Sequence: Synthetic primer
gagtaaaagaagt

SEQ ID NO: 2389 - DNA, 13 bp, Artificial Sequence
  Description of Artificial Sequence: Synthetic primer
tcagatattgagg

SEQ ID NO: 2390 - DNA, 13 bp, Artificial Sequence
  Description of Artificial Sequence: Synthetic primer
ttgatttgctgta

SEQ ID NO: 2391 - DNA, 13 bp, Artificial Sequence
  Description of Artificial Sequence: Synthetic primer
ttacacctcacaa

SEQ ID NO: 2392 - DNA, 13 bp, Artificial Sequence
  Description of Artificial Sequence: Synthetic primer
attgaatcataac

SEQ ID NO: 2393 - DNA, 13 bp, Artificial Sequence
  Description of Artificial Sequence: Synthetic primer
ttgatgccttgat

SEQ ID NO: 2394 - DNA, 13 bp, Artificial Sequence
  Description of Artificial Sequence: Synthetic primer
aagtcttcggtca

SEQ ID NO: 2395 - DNA, 13 bp, Artificial Sequence
  Description of Artificial Sequence: Synthetic primer
actaagatcattt

SEQ ID NO: 2396 - DNA, 13 bp, Artificial Sequence
  Description of Artificial Sequence: Synthetic primer
gctgacttattta

SEQ ID NO: 2397 - DNA, 13 bp, Artificial Sequence
  Description of Artificial Sequence: Synthetic primer
ttctttgagacgc

SEQ ID NO: 2398 - DNA, 13 bp, Artificial Sequence
  Description of Artificial Sequence: Synthetic primer
agagggatgagat

SEQ ID NO: 2399 - DNA, 13 bp, Artificial Sequence
  Description of Artificial Sequence: Synthetic primer
tcctctgtcaagc

SEQ ID NO: 2400 - DNA, 13 bp, Artificial Sequence
  Description of Artificial Sequence: Synthetic primer
aatcataatcttg

SEQ ID NO: 2401 - DNA, 13 bp, Artificial Sequence
  Description of Artificial Sequence: Synthetic primer
acaaacatctcaa

SEQ ID NO: 2402 - DNA, 13 bp, Artificial Sequence
  Description of Artificial Sequence: Synthetic primer
tcataactgttag

SEQ ID NO: 2403 - DNA, 13 bp, Artificial Sequence
  Description of Artificial Sequence: Synthetic primer
attggaaatattc

SEQ ID NO: 2404 - DNA, 13 bp, Artificial Sequence
  Description of Artificial Sequence: Synthetic primer
tcatctagatcat

SEQ ID NO: 2405 - DNA, 13 bp, Artificial Sequence
  Description of Artificial Sequence: Synthetic primer
agaactcttgaca

SEQ ID NO: 2406 - DNA, 13 bp, Artificial Sequence
  Description of Artificial Sequence: Synthetic primer
tgattgcacaaat

SEQ ID NO: 2407 - DNA, 13 bp, Artificial Sequence
  Description of Artificial Sequence: Synthetic primer
gagtaaaagaaat

SEQ ID NO: 2408 - DNA, 13 bp, Artificial Sequence
  Description of Artificial Sequence: Synthetic primer
catacaagaatct

SEQ ID NO: 2409 - DNA, 13 bp, Artificial Sequence
  Description of Artificial Sequence: Synthetic primer
gactcttggctat

SEQ ID NO: 2410 - DNA, 13 bp, Artificial Sequence
  Description of Artificial Sequence: Synthetic primer
ttgcataggtgaa

SEQ ID NO: 2411 - DNA, 13 bp, Artificial Sequence
  Description of Artificial Sequence: Synthetic primer
atcctaggcattt

SEQ ID NO: 2412 - DNA, 13 bp, Artificial Sequence
  Description of Artificial Sequence: Synthetic primer
gtcccaactctca

SEQ ID NO: 2413 - DNA, 13 bp, Artificial Sequence
  Description of Artificial Sequence: Synthetic primer
catcaatcccatg

SEQ ID NO: 2414 - DNA, 13 bp, Artificial Sequence
  Description of Artificial Sequence: Synthetic primer
gtctccaacatgt

SEQ ID NO: 2415 - DNA, 13 bp, Artificial Sequence
  Description of Artificial Sequence: Synthetic primer
tagtgacattctt

SEQ ID NO: 2416 - DNA, 13 bp, Artificial Sequence
  Description of Artificial Sequence: Synthetic primer
acattcacatgga

SEQ ID NO: 2417 - DNA, 13 bp, Artificial Sequence
  Description of Artificial Sequence: Synthetic primer
gacctctttgtgt

SEQ ID NO: 2418 - DNA, 13 bp, Artificial Sequence
  Description of Artificial Sequence: Synthetic primer
tgcatgtggcata

SEQ ID NO: 2419 - DNA, 13 bp, Artificial Sequence
  Description of Artificial Sequence: Synthetic primer
gatgcagccaacc

SEQ ID NO: 2420 - DNA, 13 bp, Artificial Sequence
  Description of Artificial Sequence: Synthetic primer
aacaaagcagtga

SEQ ID NO: 2421 - DNA, 13 bp, Artificial Sequence
  Description of Artificial Sequence: Synthetic primer
tgcatatggcata

SEQ ID NO: 2422 - DNA, 13 bp, Artificial Sequence
  Description of Artificial Sequence: Synthetic primer
tgtggcttcccat

SEQ ID NO: 2423 - DNA, 13 bp, Artificial Sequence
  Description of Artificial Sequence: Synthetic primer
gcatggtgccgaa

SEQ ID NO: 2424 - DNA, 13 bp, Artificial Sequence
  Description of Artificial Sequence: Synthetic primer
aagggaaaacacc

SEQ ID NO: 2425 - DNA, 13 bp, Artificial Sequence
  Description of Artificial Sequence: Synthetic primer
tctgactcgagat

SEQ ID NO: 2426 - DNA, 13 bp, Artificial Sequence
  Description of Artificial Sequence: Synthetic primer
catgccagtgtca

SEQ ID NO: 2427 - DNA, 13 bp, Artificial Sequence
  Description of Artificial Sequence: Synthetic primer
caaagaacaacag

SEQ ID NO: 2428 - DNA, 13 bp, Artificial Sequence
  Description of Artificial Sequence: Synthetic primer
tggactctctctg

SEQ ID NO: 2429 - DNA, 13 bp, Artificial Sequence
  Description of Artificial Sequence: Synthetic primer
catattgccacca

SEQ ID NO: 2430 - DNA, 13 bp, Artificial Sequence
  Description of Artificial Sequence: Synthetic primer
cttataatgaaga

SEQ ID NO: 2431 - DNA, 13 bp, Artificial Sequence
  Description of Artificial Sequence: Synthetic primer
gaaatgagactgg

SEQ ID NO: 2432 - DNA, 13 bp, Artificial Sequence
  Description of Artificial Sequence: Synthetic primer
gctgtagatgcag

SEQ ID NO: 2433 - DNA, 13 bp, Artificial Sequence
  Description of Artificial Sequence: Synthetic primer
actgttgcaaatg

SEQ ID NO: 2434 - DNA, 13 bp, Artificial Sequence
  Description of Artificial Sequence: Synthetic primer
cgcttttagagat

SEQ ID NO: 2435 - DNA, 13 bp, Artificial Sequence
  Description of Artificial Sequence: Synthetic primer
gcaatgagacagg

SEQ ID NO: 2436 - DNA, 13 bp, Artificial Sequence
  Description of Artificial Sequence: Synthetic primer
gggaccattgcca

SEQ ID NO: 2437 - DNA, 13 bp, Artificial Sequence
  Description of Artificial Sequence: Synthetic primer
acaaagcagtaaa

SEQ ID NO: 2438 - DNA, 13 bp, Artificial Sequence
  Description of Artificial Sequence: Synthetic primer
acatcagtcgaag

SEQ ID NO: 2439 - DNA, 13 bp, Artificial Sequence
  Description of Artificial Sequence: Synthetic primer
tttttccaggaag

SEQ ID NO: 2440 - DNA, 13 bp, Artificial Sequence
  Description of Artificial Sequence: Synthetic primer
acatcatggtcgg

SEQ ID NO: 2441 - DNA, 13 bp, Artificial Sequence
  Description of Artificial Sequence: Synthetic primer
agtcatctgaggt

SEQ ID NO: 2442 - DNA, 13 bp, Artificial Sequence
  Description of Artificial Sequence: Synthetic primer
catcaattccatg

SEQ ID NO: 2443 - DNA, 13 bp, Artificial Sequence
  Description of Artificial Sequence: Synthetic primer
agacttggcatgg

SEQ ID NO: 2444 - DNA, 13 bp, Artificial Sequence
  Description of Artificial Sequence: Synthetic primer
ccccatcaagcat

SEQ ID NO: 2445 - DNA, 13 bp, Artificial Sequence
  Description of Artificial Sequence: Synthetic primer
agcatgcaagctc

SEQ ID NO: 2446 - DNA, 13 bp, Artificial Sequence
  Description of Artificial Sequence: Synthetic primer
gatctttttgtct

SEQ ID NO: 2447 - DNA, 13 bp, Artificial Sequence
  Description of Artificial Sequence: Synthetic primer
gcatggtgccaaa

SEQ ID NO: 2448 - DNA, 13 bp, Artificial Sequence
  Description of Artificial Sequence: Synthetic primer
tcttcttttcaac

SEQ ID NO: 2449 - DNA, 13 bp, Artificial Sequence
  Description of Artificial Sequence: Synthetic primer
tctgattccagat

SEQ ID NO: 2450 - DNA, 13 bp, Artificial Sequence
  Description of Artificial Sequence: Synthetic primer
ttgaactgtttta

SEQ ID NO: 2451 - DNA, 13 bp, Artificial Sequence
  Description of Artificial Sequence: Synthetic primer
ggggaagacacca

SEQ ID NO: 2452 - DNA, 13 bp, Artificial Sequence
  Description of Artificial Sequence: Synthetic primer
cctcatgtgatag

SEQ ID NO: 2453 - DNA, 13 bp, Artificial Sequence
  Description of Artificial Sequence: Synthetic primer
catttacatggac

SEQ ID NO: 2454 - DNA, 13 bp, Artificial Sequence
  Description of Artificial Sequence: Synthetic primer
ttgattgtctcta

SEQ ID NO: 2455 - DNA, 13 bp, Artificial Sequence
  Description of Artificial Sequence: Synthetic primer
caaggcagtgaat

SEQ ID NO: 2456 - DNA, 13 bp, Artificial Sequence
  Description of Artificial Sequence: Synthetic primer
cccactttttgtg

SEQ ID NO: 2457 - DNA, 13 bp, Artificial Sequence
  Description of Artificial Sequence: Synthetic primer
gtaatgagacagg

SEQ ID NO: 2458 - DNA, 13 bp, Artificial Sequence
  Description of Artificial Sequence: Synthetic primer
tttaggattgcgc

SEQ ID NO: 2459 - DNA, 13 bp, Artificial Sequence
  Description of Artificial Sequence: Synthetic primer
gcaggtcatctga

SEQ ID NO: 2460 - DNA, 13 bp, Artificial Sequence
  Description of Artificial Sequence: Synthetic primer
tgtgcatgtgaca

SEQ ID NO: 2461 - DNA, 13 bp, Artificial Sequence
  Description of Artificial Sequence: Synthetic primer
cattgtggcacag

SEQ ID NO: 2462 - DNA, 13 bp, Artificial Sequence
  Description of Artificial Sequence: Synthetic primer
agctgatcatgaa

SEQ ID NO: 2463 - DNA, 13 bp, Artificial Sequence
  Description of Artificial Sequence: Synthetic primer
tttttggttgcgc

SEQ ID NO: 2464 - DNA, 13 bp, Artificial Sequence
  Description of Artificial Sequence: Synthetic primer
caaagaacaatag

SEQ ID NO: 2465 - DNA, 13 bp, Artificial Sequence
  Description of Artificial Sequence: Synthetic primer
atagaggaagtga

SEQ ID NO: 2466 - DNA, 13 bp, Artificial Sequence
  Description of Artificial Sequence: Synthetic primer
tctgtggtttccc

SEQ ID NO: 2467 - DNA, 13 bp, Artificial Sequence
  Description of Artificial Sequence: Synthetic primer
tgagtacttagca

SEQ ID NO: 2468 - DNA, 13 bp, Artificial Sequence
  Description of Artificial Sequence: Synthetic primer
catgctagtgtca

SEQ ID NO: 2469 - DNA, 13 bp, Artificial Sequence
  Description of Artificial Sequence: Synthetic primer
tgcatatggcaca

SEQ ID NO: 2470 - DNA, 13 bp, Artificial Sequence
  Description of Artificial Sequence: Synthetic primer
accactgtgggac

SEQ ID NO: 2471 - DNA, 13 bp, Artificial Sequence
  Description of Artificial Sequence: Synthetic primer
gtctccagcatgt

SEQ ID NO: 2472 - DNA, 13 bp, Artificial Sequence
  Description of Artificial Sequence: Synthetic primer
taaatgatcaact

SEQ ID NO: 2473 - DNA, 13 bp, Artificial Sequence
  Description of Artificial Sequence: Synthetic primer
caattcaagtgtc

SEQ ID NO: 2474 - DNA, 13 bp, Artificial Sequence
  Description of Artificial Sequence: Synthetic primer
gtcccaaactgat

SEQ ID NO: 2475 - DNA, 13 bp, Artificial Sequence
  Description of Artificial Sequence: Synthetic primer
ccttcacctggac

SEQ ID NO: 2476 - DNA, 13 bp, Artificial Sequence
  Description of Artificial Sequence: Synthetic primer
atatcatggttgg

SEQ ID NO: 2477 - DNA, 13 bp, Artificial Sequence
  Description of Artificial Sequence: Synthetic primer
agaagaggtgatg

SEQ ID NO: 2478 - DNA, 13 bp, Artificial Sequence
  Description of Artificial Sequence: Synthetic primer
atgctggggatgc

SEQ ID NO: 2479 - DNA, 13 bp, Artificial Sequence
  Description of Artificial Sequence: Synthetic primer
gataaatgaccaa

SEQ ID NO: 2480 - DNA, 13 bp, Artificial Sequence
  Description of Artificial Sequence: Synthetic primer
gtcagacttggca

SEQ ID NO: 2481 - DNA, 13 bp, Artificial Sequence
  Description of Artificial Sequence: Synthetic primer
tgggacaaatagt

SEQ ID NO: 2482 - DNA, 13 bp, Artificial Sequence
  Description of Artificial Sequence: Synthetic primer
attctttcaagaa

SEQ ID NO: 2483 - DNA, 13 bp, Artificial Sequence
  Description of Artificial Sequence: Synthetic primer
atggaggaagaca

SEQ ID NO: 2484 - DNA, 13 bp, Artificial Sequence
  Description of Artificial Sequence: Synthetic primer
tatcaaaagacag

SEQ ID NO: 2485 - DNA, 13 bp, Artificial Sequence
  Description of Artificial Sequence: Synthetic primer
aggtttgttgcag

SEQ ID NO: 2486 - DNA, 13 bp, Artificial Sequence
  Description of Artificial Sequence: Synthetic primer
ccagagggtgaag

SEQ ID NO: 2487 - DNA, 13 bp, Artificial Sequence
  Description of Artificial Sequence: Synthetic primer
ggatcctaggcat

SEQ ID NO: 2488 - DNA, 13 bp, Artificial Sequence
  Description of Artificial Sequence: Synthetic primer
tagatgtgaattg

SEQ ID NO: 2489 - DNA, 13 bp, Artificial Sequence
  Description of Artificial Sequence: Synthetic primer
tacctgattgggt

SEQ ID NO: 2490 - DNA, 13 bp, Artificial Sequence
  Description of Artificial Sequence: Synthetic primer
acaaaagaaacac

SEQ ID NO: 2491 - DNA, 13 bp, Artificial Sequence
  Description of Artificial Sequence: Synthetic primer
tgatcatgggatt

SEQ ID NO: 2492 - DNA, 13 bp, Artificial Sequence
  Description of Artificial Sequence: Synthetic primer
agtaaaaggtgtc

SEQ ID NO: 2493 - DNA, 13 bp, Artificial Sequence
  Description of Artificial Sequence: Synthetic primer
acattagttcaat

SEQ ID NO: 2494 - DNA, 13 bp, Artificial Sequence
  Description of Artificial Sequence: Synthetic primer
cactaggtagcaa

SEQ ID NO: 2495 - DNA, 13 bp, Artificial Sequence
  Description of Artificial Sequence: Synthetic primer
cagcaagcaatga

SEQ ID NO: 2496 - DNA, 13 bp, Artificial Sequence
  Description of Artificial Sequence: Synthetic primer
aaccaaaacaagc

SEQ ID NO: 2497 - DNA, 13 bp, Artificial Sequence
  Description of Artificial Sequence: Synthetic primer
tgaactttcaaac

SEQ ID NO: 2498 - DNA, 13 bp, Artificial Sequence
  Description of Artificial Sequence: Synthetic primer
tgtctgattctga

SEQ ID NO: 2499 - DNA, 13 bp, Artificial Sequence
  Description of Artificial Sequence: Synthetic primer
aataatggttcat

SEQ ID NO: 2500 - DNA, 13 bp, Artificial Sequence
  Description of Artificial Sequence: Synthetic primer
gtgaacagatgca

SEQ ID NO: 2501 - DNA, 13 bp, Artificial Sequence
  Description of Artificial Sequence: Synthetic primer
ttgatccattcct

SEQ ID NO: 2502 - DNA, 13 bp, Artificial Sequence
  Description of Artificial Sequence: Synthetic primer
ttgaatcagatgt

SEQ ID NO: 2503 - DNA, 13 bp, Artificial Sequence
  Description of Artificial Sequence: Synthetic primer
gttcagttttacc

SEQ ID NO: 2504 - DNA, 13 bp, Artificial Sequence
  Description of Artificial Sequence: Synthetic primer
acaaggaacaagt

SEQ ID NO: 2505 - DNA, 13 bp, Artificial Sequence
  Description of Artificial Sequence: Synthetic primer
ttggtgcattgaa

SEQ ID NO: 2506 - DNA, 13 bp, Artificial Sequence
  Description of Artificial Sequence: Synthetic primer
agtatcaaatctt

SEQ ID NO: 2507 - DNA, 13 bp, Artificial Sequence
  Description of Artificial Sequence: Synthetic primer
agatactctcatt

SEQ ID NO: 2508 - DNA, 13 bp, Artificial Sequence
  Description of Artificial Sequence: Synthetic primer
gagttgtttgggc

SEQ ID NO: 2509 - DNA, 13 bp, Artificial Sequence
  Description of Artificial Sequence: Synthetic primer
tgacagatcagat

SEQ ID NO: 2510 - DNA, 13 bp, Artificial Sequence
  Description of Artificial Sequence: Synthetic primer
ataagttaccaga

SEQ ID NO: 2511 - DNA, 13 bp, Artificial Sequence
  Description of Artificial Sequence: Synthetic primer
tgggtgcatgggt

SEQ ID NO: 2512 - DNA, 13 bp, Artificial Sequence
  Description of Artificial Sequence: Synthetic primer
aacggtggataga

SEQ ID NO: 2513 - DNA, 13 bp, Artificial Sequence
  Description of Artificial Sequence: Synthetic primer
gcagaacatgtga

SEQ ID NO: 2514 - DNA, 13 bp, Artificial Sequence
  Description of Artificial Sequence: Synthetic primer
tgagtattcttgg

SEQ ID NO: 2515 - DNA, 13 bp, Artificial Sequence
  Description of Artificial Sequence: Synthetic primer
tacctgactgggt

SEQ ID NO: 2516 - DNA, 13 bp, Artificial Sequence
  Description of Artificial Sequence: Synthetic primer
aatgctggagatc

SEQ ID NO: 2517 - DNA, 13 bp, Artificial Sequence
  Description of Artificial Sequence: Synthetic primer
atggttcactatt

SEQ ID NO: 2518 - DNA, 13 bp, Artificial Sequence
  Description of Artificial Sequence: Synthetic primer
aggacaaatctgt

SEQ ID NO: 2519 - DNA, 13 bp, Artificial Sequence
  Description of Artificial Sequence: Synthetic primer
tacttgacatggg

SEQ ID NO: 2520 - DNA, 13 bp, Artificial Sequence
  Description of Artificial Sequence: Synthetic primer
ctattgacccatt

SEQ ID NO: 2521 - DNA, 13 bp, Artificial Sequence
  Description of Artificial Sequence: Synthetic primer
catggtatgttga

SEQ ID NO: 2522 - DNA, 13 bp, Artificial Sequence
  Description of Artificial Sequence: Synthetic primer
gttggggacactt

SEQ ID NO: 2523 - DNA, 13 bp, Artificial Sequence
  Description of Artificial Sequence: Synthetic primer
ggtggaggtgttg

SEQ ID NO: 2524 - DNA, 13 bp, Artificial Sequence
  Description of Artificial Sequence: Synthetic primer
aggtacactcatt

SEQ ID NO: 2525 - DNA, 13 bp, Artificial Sequence
  Description of Artificial Sequence: Synthetic primer
aaatgtgttcggg

SEQ ID NO: 2526 - DNA, 13 bp, Artificial Sequence
  Description of Artificial Sequence: Synthetic primer
tgcagatcgaaga

SEQ ID NO: 2527 - DNA, 13 bp, Artificial Sequence
  Description of Artificial Sequence: Synthetic primer
gatgttaactgtg

SEQ ID NO: 2528 - DNA, 13 bp, Artificial Sequence
  Description of Artificial Sequence: Synthetic primer
tcctccaaaatct

SEQ ID NO: 2529 - DNA, 13 bp, Artificial Sequence
  Description of Artificial Sequence: Synthetic primer
gtcagacagtgag

SEQ ID NO: 2530 - DNA, 13 bp, Artificial Sequence
  Description of Artificial Sequence: Synthetic primer
agaaatgggttga

SEQ ID NO: 2531 - DNA, 13 bp, Artificial Sequence
  Description of Artificial Sequence: Synthetic primer
cagcaggcaatga

SEQ ID NO: 2532 - DNA, 13 bp, Artificial Sequence
  Description of Artificial Sequence: Synthetic primer
aaagaacaagtgg

SEQ ID NO: 2533 - DNA, 13 bp, Artificial Sequence
  Description of Artificial Sequence: Synthetic primer
acaatcagttatc

SEQ ID NO: 2534 - DNA, 13 bp, Artificial Sequence
  Description of Artificial Sequence: Synthetic primer
agggactgtaggg

SEQ ID NO: 2535 - DNA, 13 bp, Artificial Sequence
  Description of Artificial Sequence: Synthetic primer
ccatttttattct

SEQ ID NO: 2536 - DNA, 13 bp, Artificial Sequence
  Description of Artificial Sequence: Synthetic primer
agtccaaagagtg

SEQ ID NO: 2537 - DNA, 13 bp, Artificial Sequence
  Description of Artificial Sequence: Synthetic primer
cttttgtggggca

SEQ ID NO: 2538 - DNA, 13 bp, Artificial Sequence
  Description of Artificial Sequence: Synthetic primer
cagagggtgaggg

SEQ ID NO: 2539 - DNA, 13 bp, Artificial Sequence
  Description of Artificial Sequence: Synthetic primer
gatggaggagttg

SEQ ID NO: 2540 - DNA, 13 bp, Artificial Sequence
  Description of Artificial Sequence: Synthetic primer
tacaaagaacaag

SEQ ID NO: 2541 - DNA, 13 bp, Artificial Sequence
  Description of Artificial Sequence: Synthetic primer
acatggggcaagg

SEQ ID NO: 2542 - DNA, 13 bp, Artificial Sequence
  Description of Artificial Sequence: Synthetic primer
acaatggctctct

SEQ ID NO: 2543 - DNA, 13 bp, Artificial Sequence
  Description of Artificial Sequence: Synthetic primer
tggtttccacata

SEQ ID NO: 2544 - DNA, 13 bp, Artificial Sequence
  Description of Artificial Sequence: Synthetic primer
atcagaaaacagg

SEQ ID NO: 2545 - DNA, 13 bp, Artificial Sequence
  Description of Artificial Sequence: Synthetic primer
atcccattgatcc

SEQ ID NO: 2546 - DNA, 13 bp, Artificial Sequence
  Description of Artificial Sequence: Synthetic primer
caggtgaatgctc

SEQ ID NO: 2547 - DNA, 13 bp, Artificial Sequence
  Description of Artificial Sequence: Synthetic primer
tgaccttgttgtg

SEQ ID NO: 2548 - DNA, 13 bp, Artificial Sequence
  Description of Artificial Sequence: Synthetic primer
cagactgatccag

SEQ ID NO: 2549 - DNA, 13 bp, Artificial Sequence
  Description of Artificial Sequence: Synthetic primer
agtgttgggagcg

SEQ ID NO: 2550 - DNA, 13 bp, Artificial Sequence
  Description of Artificial Sequence: Synthetic primer
gcgatgggagaca

SEQ ID NO: 2551 - DNA, 13 bp, Artificial Sequence
  Description of Artificial Sequence: Synthetic primer
ggccaatgagagg

SEQ ID NO: 2552 - DNA, 13 bp, Artificial Sequence
  Description of Artificial Sequence: Synthetic primer
ggaaattggctgg

SEQ ID NO: 2553 - DNA, 13 bp, Artificial Sequence
  Description of Artificial Sequence: Synthetic primer
gttcctgggtgtt

SEQ ID NO: 2554 - DNA, 13 bp, Artificial Sequence
  Description of Artificial Sequence: Synthetic primer
tcattccgaaatc

SEQ ID NO: 2555 - DNA, 13 bp, Artificial Sequence
  Description of Artificial Sequence: Synthetic primer
gggttgtgcagaa

SEQ ID NO: 2556 - DNA, 13 bp, Artificial Sequence
  Description of Artificial Sequence: Synthetic primer
tgaaccctagcaa

SEQ ID NO: 2557 - DNA, 13 bp, Artificial Sequence
  Description of Artificial Sequence: Synthetic primer
accttaaaaagtg

SEQ ID NO: 2558 - DNA, 13 bp, Artificial Sequence
  Description of Artificial Sequence: Synthetic primer
aagacctttctgt

SEQ ID NO: 2559 - DNA, 13 bp, Artificial Sequence
  Description of Artificial Sequence: Synthetic primer
tctgtgcctggat

SEQ ID NO: 2560 - DNA, 13 bp, Artificial Sequence
  Description of Artificial Sequence: Synthetic primer
ttcagccaacaat

SEQ ID NO: 2561 - DNA, 13 bp, Artificial Sequence
  Description of Artificial Sequence: Synthetic primer
caccctctcagaa

SEQ ID NO: 2562 - DNA, 13 bp, Artificial Sequence
  Description of Artificial Sequence: Synthetic primer
aaatatttgtgac

SEQ ID NO: 2563 - DNA, 13 bp, Artificial Sequence
  Description of Artificial Sequence: Synthetic primer
gagattgtatcag

SEQ ID NO: 2564 - DNA, 13 bp, Artificial Sequence
  Description of Artificial Sequence: Synthetic primer
aagagggaggctg

SEQ ID NO: 2565 - DNA, 13 bp, Artificial Sequence
  Description of Artificial Sequence: Synthetic primer
cccattgacccat

SEQ ID NO: 2566 - DNA, 13 bp, Artificial Sequence
  Description of Artificial Sequence: Synthetic primer
agatttgttgcag

SEQ ID NO: 2567 - DNA, 13 bp, Artificial Sequence
  Description of Artificial Sequence: Synthetic primer
attgtctctcatt

SEQ ID NO: 2568 - DNA, 13 bp, Artificial Sequence
  Description of Artificial Sequence: Synthetic primer
agtgaactgttgc

SEQ ID NO: 2569 - DNA, 13 bp, Artificial Sequence
  Description of Artificial Sequence: Synthetic primer
tgatgaatgggaa

SEQ ID NO: 2570 - DNA, 13 bp, Artificial Sequence
  Description of Artificial Sequence: Synthetic primer
ttgagcggaggca

SEQ ID NO: 2571 - DNA, 13 bp, Artificial Sequence
  Description of Artificial Sequence: Synthetic primer
ctgacccacaagc

SEQ ID NO: 2572 - DNA, 13 bp, Artificial Sequence
  Description of Artificial Sequence: Synthetic primer
ttaattgaggagg

SEQ ID NO: 2573 - DNA, 13 bp, Artificial Sequence
  Description of Artificial Sequence: Synthetic primer
tgatcatgaatgc

SEQ ID NO: 2574 - DNA, 13 bp, Artificial Sequence
  Description of Artificial Sequence: Synthetic primer
tacggtggaggtg

SEQ ID NO: 2575 - DNA, 13 bp, Artificial Sequence
  Description of Artificial Sequence: Synthetic primer
catataaagaaca

SEQ ID NO: 2576 - DNA, 13 bp, Artificial Sequence
  Description of Artificial Sequence: Synthetic primer
tctcacatcagtt

SEQ ID NO: 2577 - DNA, 13 bp, Artificial Sequence
  Description of Artificial Sequence: Synthetic primer
agaacattgggta

SEQ ID NO: 2578 - DNA, 13 bp, Artificial Sequence
  Description of Artificial Sequence: Synthetic primer
atcttactttctg

SEQ ID NO: 2579 - DNA, 13 bp, Artificial Sequence
  Description of Artificial Sequence: Synthetic primer
gcctggtttgttg

SEQ ID NO: 2580 - DNA, 13 bp, Artificial Sequence
  Description of Artificial Sequence: Synthetic primer
tcacacccactat

SEQ ID NO: 2581 - DNA, 13 bp, Artificial Sequence
  Description of Artificial Sequence: Synthetic primer
tgcaatgttggag

SEQ ID NO: 2582 - DNA, 13 bp, Artificial Sequence
  Description of Artificial Sequence: Synthetic primer
atggaggaggaca

SEQ ID NO: 2583 - DNA, 13 bp, Artificial Sequence
  Description of Artificial Sequence: Synthetic primer
agactgaagggaa

SEQ ID NO: 2584 - DNA, 13 bp, Artificial Sequence
  Description of Artificial Sequence: Synthetic primer
ttggagcatgggt

SEQ ID NO: 2585 - DNA, 13 bp, Artificial Sequence
  Description of Artificial Sequence: Synthetic primer
ttaaagaaaagga

SEQ ID NO: 2586 - DNA, 13 bp, Artificial Sequence
  Description of Artificial Sequence: Synthetic primer
cggtggatggaca

SEQ ID NO: 2587 - DNA, 13 bp, Artificial Sequence
  Description of Artificial Sequence: Synthetic primer
gagattggtgata

SEQ ID NO: 2588 - DNA, 13 bp, Artificial Sequence
  Description of Artificial Sequence: Synthetic primer
ttgatatgggaca

SEQ ID NO: 2589 - DNA, 13 bp, Artificial Sequence
  Description of Artificial Sequence: Synthetic primer
gtctgatgctgtc

SEQ ID NO: 2590 - DNA, 13 bp, Artificial Sequence
  Description of Artificial Sequence: Synthetic primer
gcactttcacttg

SEQ ID NO: 2591 - DNA, 13 bp, Artificial Sequence
  Description of Artificial Sequence: Synthetic primer
tccaaaaccttag

SEQ ID NO: 2592 - DNA, 13 bp, Artificial Sequence
  Description of Artificial Sequence: Synthetic primer
caacaggcaatga

SEQ ID NO: 2593 - DNA, 13 bp, Artificial Sequence
  Description of Artificial Sequence: Synthetic primer
tggtggaagaaaa

SEQ ID NO: 2594 - DNA, 13 bp, Artificial Sequence
  Description of Artificial Sequence: Synthetic primer
agtttgtgagccc

SEQ ID NO: 2595 - DNA, 13 bp, Artificial Sequence
  Description of Artificial Sequence: Synthetic primer
agaattctccatg

SEQ ID NO: 2596 - DNA, 13 bp, Artificial Sequence
  Description of Artificial Sequence: Synthetic primer
gttgtccctacaa

SEQ ID NO: 2597 - DNA, 13 bp, Artificial Sequence
  Description of Artificial Sequence: Synthetic primer
ataaggaacaagt

SEQ ID NO: 2598 - DNA, 13 bp, Artificial Sequence
  Description of Artificial Sequence: Synthetic primer
acaaaggaaacac

SEQ ID NO: 2599 - DNA, 13 bp, Artificial Sequence
  Description of Artificial Sequence: Synthetic primer
ttgaagaagagta

SEQ ID NO: 2600 - DNA, 13 bp, Artificial Sequence
  Description of Artificial Sequence: Synthetic primer
cctccagggtctg

SEQ ID NO: 2601 - DNA, 13 bp, Artificial Sequence
  Description of Artificial Sequence: Synthetic primer
aacaggcgatgag

SEQ ID NO: 2602 - DNA, 13 bp, Artificial Sequence
  Description of Artificial Sequence: Synthetic primer
gtttcattggttg

SEQ ID NO: 2603 - DNA, 13 bp, Artificial Sequence
  Description of Artificial Sequence: Synthetic primer
ttgtggggcacca

SEQ ID NO: 2604 - DNA, 13 bp, Artificial Sequence
  Description of Artificial Sequence: Synthetic primer
acaatgccagtgg

SEQ ID NO: 2605 - DNA, 13 bp, Artificial Sequence
  Description of Artificial Sequence: Synthetic primer
tgcagtgttggag

SEQ ID NO: 2606 - DNA, 13 bp, Artificial Sequence
  Description of Artificial Sequence: Synthetic primer
atgtcaactgtga

SEQ ID NO: 2607 - DNA, 13 bp, Artificial Sequence
  Description of Artificial Sequence: Synthetic primer
ttgaagaggagta

SEQ ID NO: 2608 - DNA, 13 bp, Artificial Sequence
  Description of Artificial Sequence: Synthetic primer
gtctcaaataagt

SEQ ID NO: 2609 - DNA, 13 bp, Artificial Sequence
  Description of Artificial Sequence: Synthetic primer
ttcacttggttcc

SEQ ID NO: 2610 - DNA, 13 bp, Artificial Sequence
  Description of Artificial Sequence: Synthetic primer
tgtgttctgggtc

SEQ ID NO: 2611 - DNA, 13 bp, Artificial Sequence
  Description of Artificial Sequence: Synthetic primer
atcaaatgctttg

SEQ ID NO: 2612 - DNA, 13 bp, Artificial Sequence
  Description of Artificial Sequence: Synthetic primer
aacaagcaatgag

SEQ ID NO: 2613 - DNA, 13 bp, Artificial Sequence
  Description of Artificial Sequence: Synthetic primer
aacgttctcaaaa

SEQ ID NO: 2614 - DNA, 13 bp, Artificial Sequence
  Description of Artificial Sequence: Synthetic primer
ctctagcagacca

SEQ ID NO: 2615 - DNA, 13 bp, Artificial Sequence
  Description of Artificial Sequence: Synthetic primer
agacagttaaggt

SEQ ID NO: 2616 - DNA, 13 bp, Artificial Sequence
  Description of Artificial Sequence: Synthetic primer
aggggctgtaggg

SEQ ID NO: 2617 - DNA, 13 bp, Artificial Sequence
  Description of Artificial Sequence: Synthetic primer
atggaggaagata

SEQ ID NO: 2618 - DNA, 13 bp, Artificial Sequence
  Description of Artificial Sequence: Synthetic primer
atagacagcagga

SEQ ID NO: 2619 - DNA, 13 bp, Artificial Sequence
  Description of Artificial Sequence: Synthetic primer
cttctgtggggca

SEQ ID NO: 2620 - DNA, 13 bp, Artificial Sequence
  Description of Artificial Sequence: Synthetic primer
tactgacacatcc

SEQ ID NO: 2621 - DNA, 13 bp, Artificial Sequence
  Description of Artificial Sequence: Synthetic primer
tgtcttacaagga

SEQ ID NO: 2622 - DNA, 13 bp, Artificial Sequence
  Description of Artificial Sequence: Synthetic primer
actgaggtcatta

SEQ ID NO: 2623 - DNA, 13 bp, Artificial Sequence
  Description of Artificial Sequence: Synthetic primer
ccttgtctcttgt

SEQ ID NO: 2624 - DNA, 13 bp, Artificial Sequence
  Description of Artificial Sequence: Synthetic primer
ccgttactctagc

SEQ ID NO: 2625 - DNA, 13 bp, Artificial Sequence
  Description of Artificial Sequence: Synthetic primer
gaagtgaagaagg

SEQ ID NO: 2626 - DNA, 13 bp, Artificial Sequence
  Description of Artificial Sequence: Synthetic primer
caatgctggaggt

SEQ ID NO: 2627 - DNA, 13 bp, Artificial Sequence
  Description of Artificial Sequence: Synthetic primer
ccccacaattagt

SEQ ID NO: 2628 - DNA, 13 bp, Artificial Sequence
  Description of Artificial Sequence: Synthetic primer
gagaagttgggga

SEQ ID NO: 2629 - DNA, 13 bp, Artificial Sequence
  Description of Artificial Sequence: Synthetic primer
agttatcagaaaa

SEQ ID NO: 2630 - DNA, 13 bp, Artificial Sequence
  Description of Artificial Sequence: Synthetic primer
gaacactgggtag

SEQ ID NO: 2631 - DNA, 13 bp, Artificial Sequence
  Description of Artificial Sequence: Synthetic primer
catgtgaggagtt

SEQ ID NO: 2632 - DNA, 13 bp, Artificial Sequence
  Description of Artificial Sequence: Synthetic primer
ttatgaatgcaaa

SEQ ID NO: 2633 - DNA, 13 bp, Artificial Sequence
  Description of Artificial Sequence: Synthetic primer
gtccatttctatt

SEQ ID NO: 2634 - DNA, 13 bp, Artificial Sequence
  Description of Artificial Sequence: Synthetic primer
acgggaccttgtc

SEQ ID NO: 2635 - DNA, 13 bp, Artificial Sequence
  Description of Artificial Sequence: Synthetic primer
gactaaagggaag

SEQ ID NO: 2636 - DNA, 13 bp, Artificial Sequence
  Description of Artificial Sequence: Synthetic primer
ttgagcccccatc

SEQ ID NO: 2637 - DNA, 13 bp, Artificial Sequence
  Description of Artificial Sequence: Synthetic primer
atctggttctagg

SEQ ID NO: 2638 - DNA, 13 bp, Artificial Sequence
  Description of Artificial Sequence: Synthetic primer
tctaattgacaca

SEQ ID NO: 2639 - DNA, 13 bp, Artificial Sequence
  Description of Artificial Sequence: Synthetic primer
tgtatggtggggg

SEQ ID NO: 2640 - DNA, 13 bp, Artificial Sequence
  Description of Artificial Sequence: Synthetic primer
attttactttctg

SEQ ID NO: 2641 - DNA, 13 bp, Artificial Sequence
  Description of Artificial Sequence: Synthetic primer
attgaggaagagt

SEQ ID NO: 2642 - DNA, 13 bp, Artificial Sequence
  Description of Artificial Sequence: Synthetic primer
gtggtaacaggga

SEQ ID NO: 2643 - DNA, 13 bp, Artificial Sequence
  Description of Artificial Sequence: Synthetic primer
ggggcattgagtg

SEQ ID NO: 2644 - DNA, 13 bp, Artificial Sequence
  Description of Artificial Sequence: Synthetic primer
caccagctgacct

SEQ ID NO: 2645 - DNA, 13 bp, Artificial Sequence
  Description of Artificial Sequence: Synthetic primer
gtccatttttgtt

SEQ ID NO: 2646 - DNA, 13 bp, Artificial Sequence
  Description of Artificial Sequence: Synthetic primer
tgtatggtggagg

SEQ ID NO: 2647 - DNA, 13 bp, Artificial Sequence
  Description of Artificial Sequence: Synthetic primer
tgattaaaggtga

SEQ ID NO: 2648 - DNA, 13 bp, Artificial Sequence
  Description of Artificial Sequence: Synthetic primer
gggtcaatgataa

SEQ ID NO: 2649 - DNA, 13 bp, Artificial Sequence
  Description of Artificial Sequence: Synthetic primer
atgaccatggggt

SEQ ID NO: 2650 - DNA, 13 bp, Artificial Sequence
  Description of Artificial Sequence: Synthetic primer
cgggacctcattc

SEQ ID NO: 2651 - DNA, 13 bp, Artificial Sequence
  Description of Artificial Sequence: Synthetic primer
tcacacctactat

SEQ ID NO: 2652 - DNA, 13 bp, Artificial Sequence
  Description of Artificial Sequence: Synthetic primer
gacacttcatctg

SEQ ID NO: 2653 - DNA, 13 bp, Artificial Sequence
  Description of Artificial Sequence: Synthetic primer
ctctcttctgagg

SEQ ID NO: 2654 - DNA, 13 bp, Artificial Sequence
  Description of Artificial Sequence: Synthetic primer
caatacttgatat

SEQ ID NO: 2655 - DNA, 13 bp, Artificial Sequence
  Description of Artificial Sequence: Synthetic primer
aaacggttgaatc

SEQ ID NO: 2656 - DNA, 13 bp, Artificial Sequence
  Description of Artificial Sequence: Synthetic primer
gagagattggtga

SEQ ID NO: 2657 - DNA, 13 bp, Artificial Sequence
  Description of Artificial Sequence: Synthetic primer
aaacgcagtcaaa

SEQ ID NO: 2658 - DNA, 13 bp, Artificial Sequence
  Description of Artificial Sequence: Synthetic primer
acaatcagttacc

SEQ ID NO: 2659 - DNA, 13 bp, Artificial Sequence
  Description of Artificial Sequence: Synthetic primer
gtggtttccacac

SEQ ID NO: 2660 - DNA, 13 bp, Artificial Sequence
  Description of Artificial Sequence: Synthetic primer
gcagaacatgcga

SEQ ID NO: 2661 - DNA, 13 bp, Artificial Sequence
  Description of Artificial Sequence: Synthetic primer
tgtgaactgtgag

SEQ ID NO: 2662 - DNA, 13 bp, Artificial Sequence
  Description of Artificial Sequence: Synthetic primer
ccagacaattagg

SEQ ID NO: 2663 - DNA, 13 bp, Artificial Sequence
  Description of Artificial Sequence: Synthetic primer
accagaagacagg

SEQ ID NO: 2664 - DNA, 13 bp, Artificial Sequence
  Description of Artificial Sequence: Synthetic primer
agtgtgttagagg

SEQ ID NO: 2665 - DNA, 13 bp, Artificial Sequence
  Description of Artificial Sequence: Synthetic primer
ttaaggctatcta

SEQ ID NO: 2666 - DNA, 13 bp, Artificial Sequence
  Description of Artificial Sequence: Synthetic primer
ggtctgcaaaact

SEQ ID NO: 2667 - DNA, 13 bp, Artificial Sequence
  Description of Artificial Sequence: Synthetic primer
gaacggaggcaac

SEQ ID NO: 2668 - DNA, 13 bp, Artificial Sequence
  Description of Artificial Sequence: Synthetic primer
tgtctgactctga

SEQ ID NO: 2669 - DNA, 13 bp, Artificial Sequence
  Description of Artificial Sequence: Synthetic primer
tattggattgcgc

SEQ ID NO: 2670 - DNA, 13 bp, Artificial Sequence
  Description of Artificial Sequence: Synthetic primer
agacaatggatgg

SEQ ID NO: 2671 - DNA, 13 bp, Artificial Sequence
  Description of Artificial Sequence: Synthetic primer
gcttgttgttcaa

SEQ ID NO: 2672 - DNA, 13 bp, Artificial Sequence
  Description of Artificial Sequence: Synthetic primer
agaacagaaaggc

SEQ ID NO: 2673 - DNA, 13 bp, Artificial Sequence
  Description of Artificial Sequence: Synthetic primer
tggtcctttgtga

SEQ ID NO: 2674 - DNA, 13 bp, Artificial Sequence
  Description of Artificial Sequence: Synthetic primer
atctttcccccat

SEQ ID NO: 2675 - DNA, 13 bp, Artificial Sequence
  Description of Artificial Sequence: Synthetic primer
agaggcatggtca

SEQ ID NO: 2676 - DNA, 13 bp, Artificial Sequence
  Description of Artificial Sequence: Synthetic primer
tgaccagtgctgt

SEQ ID NO: 2677 - DNA, 13 bp, Artificial Sequence
  Description of Artificial Sequence: Synthetic primer
aagaggaaataac

SEQ ID NO: 2678 - DNA, 13 bp, Artificial Sequence
  Description of Artificial Sequence: Synthetic primer
tgctcatttgtgc

SEQ ID NO: 2679 - DNA, 13 bp, Artificial Sequence
  Description of Artificial Sequence: Synthetic primer
ggttactgctcca

SEQ ID NO: 2680 - DNA, 13 bp, Artificial Sequence
  Description of Artificial Sequence: Synthetic primer
ctcatctcttcca

SEQ ID NO: 2681 - DNA, 13 bp, Artificial Sequence
  Description of Artificial Sequence: Synthetic primer
cctattctcagct

SEQ ID NO: 2682 - DNA, 13 bp, Artificial Sequence
  Description of Artificial Sequence: Synthetic primer
tcatctgtgcttc

SEQ ID NO: 2683 - DNA, 13 bp, Artificial Sequence
  Description of Artificial Sequence: Synthetic primer
ctgctcaacctgg

SEQ ID NO: 2684 - DNA, 13 bp, Artificial Sequence
  Description of Artificial Sequence: Synthetic primer
agggcattgtcat

SEQ ID NO: 2685 - DNA, 13 bp, Artificial Sequence
  Description of Artificial Sequence: Synthetic primer
caagcattgacag

SEQ ID NO: 2686 - DNA, 13 bp, Artificial Sequence
  Description of Artificial Sequence: Synthetic primer
gatgctcaggctc

SEQ ID NO: 2687 - DNA, 13 bp, Artificial Sequence
  Description of Artificial Sequence: Synthetic primer
gatttgaatgatg

SEQ ID NO: 2688 - DNA, 13 bp, Artificial Sequence
  Description of Artificial Sequence: Synthetic primer
ggcaaagaagaaa

SEQ ID NO: 2689 - DNA, 13 bp, Artificial Sequence
  Description of Artificial Sequence: Synthetic primer
atcttttccactt

SEQ ID NO: 2690 - DNA, 13 bp, Artificial Sequence
  Description of Artificial Sequence: Synthetic primer
caacagggctgac

SEQ ID NO: 2691 - DNA, 13 bp, Artificial Sequence
  Description of Artificial Sequence: Synthetic primer
ccattgaagtcac

SEQ ID NO: 2692 - DNA, 13 bp, Artificial Sequence
  Description of Artificial Sequence: Synthetic primer
agataaccgatgg

SEQ ID NO: 2693 - DNA, 13 bp, Artificial Sequence
  Description of Artificial Sequence: Synthetic primer
ggacagaaaggcc

SEQ ID NO: 2694 - DNA, 13 bp, Artificial Sequence
  Description of Artificial Sequence: Synthetic primer
gttatcatgttgt

SEQ ID NO: 2695 - DNA, 13 bp, Artificial Sequence
  Description of Artificial Sequence: Synthetic primer
gtggatcctaggc

SEQ ID NO: 2696 - DNA, 13 bp, Artificial Sequence
  Description of Artificial Sequence: Synthetic primer
aacaaggtcaagt

SEQ ID NO: 2697 - DNA, 13 bp, Artificial Sequence
  Description of Artificial Sequence: Synthetic primer
catctcagtgatc

SEQ ID NO: 2698 - DNA, 13 bp, Artificial Sequence
  Description of Artificial Sequence: Synthetic primer
tggttctttgtga

SEQ ID NO: 2699 - DNA, 13 bp, Artificial Sequence
  Description of Artificial Sequence: Synthetic primer
ctttacagtcagc

SEQ ID NO: 2700 - DNA, 13 bp, Artificial Sequence
  Description of Artificial Sequence: Synthetic primer
tacaggtggtgaa

SEQ ID NO: 2701 - DNA, 13 bp, Artificial Sequence
  Description of Artificial Sequence: Synthetic primer
gcgctttgctttt

SEQ ID NO: 2702 - DNA, 13 bp, Artificial Sequence
  Description of Artificial Sequence: Synthetic primer
atactcatttgtg

SEQ ID NO: 2703 - DNA, 13 bp, Artificial Sequence
  Description of Artificial Sequence: Synthetic primer
ggcaggttgactt

SEQ ID NO: 2704 - DNA, 13 bp, Artificial Sequence
  Description of Artificial Sequence: Synthetic primer
cccgcactgtgct

SEQ ID NO: 2705 - DNA, 13 bp, Artificial Sequence
  Description of Artificial Sequence: Synthetic primer
agtcggcagggtt

SEQ ID NO: 2706 - DNA, 13 bp, Artificial Sequence
  Description of Artificial Sequence: Synthetic primer
ctatcttttccat

SEQ ID NO: 2707 - DNA, 13 bp, Artificial Sequence
  Description of Artificial Sequence: Synthetic primer
atggcatcttgaa

SEQ ID NO: 2708 - DNA, 13 bp, Artificial Sequence
  Description of Artificial Sequence: Synthetic primer
taacccctcactg

SEQ ID NO: 2709 - DNA, 13 bp, Artificial Sequence
  Description of Artificial Sequence: Synthetic primer
cattaaagtcaca

SEQ ID NO: 2710 - DNA, 13 bp, Artificial Sequence
  Description of Artificial Sequence: Synthetic primer
aggggcattgtca

SEQ ID NO: 2711 - DNA, 13 bp, Artificial Sequence
  Description of Artificial Sequence: Synthetic primer
atcctcaaatcca

SEQ ID NO: 2712 - DNA, 13 bp, Artificial Sequence
  Description of Artificial Sequence: Synthetic primer
gatgctcaagctc

SEQ ID NO: 2713 - DNA, 13 bp, Artificial Sequence
  Description of Artificial Sequence: Synthetic primer
tgaccagtgcagt

SEQ ID NO: 2714 - DNA, 13 bp, Artificial Sequence
  Description of Artificial Sequence: Synthetic primer
aaggtcattagaa

SEQ ID NO: 2715 - DNA, 13 bp, Artificial Sequence
  Description of Artificial Sequence: Synthetic primer
tatctcttccact

SEQ ID NO: 2716 - DNA, 13 bp, Artificial Sequence
  Description of Artificial Sequence: Synthetic primer
tgtactgcacact

SEQ ID NO: 2717 - DNA, 13 bp, Artificial Sequence
  Description of Artificial Sequence: Synthetic primer
caaacaatggatg

SEQ ID NO: 2718 - DNA, 13 bp, Artificial Sequence
  Description of Artificial Sequence: Synthetic primer
agtgctgtcatag

SEQ ID NO: 2719 - DNA, 13 bp, Artificial Sequence
  Description of Artificial Sequence: Synthetic primer
actttcaaccagt

SEQ ID NO: 2720 - DNA, 13 bp, Artificial Sequence
  Description of Artificial Sequence: Synthetic primer
atctcttccatct

SEQ ID NO: 2721 - DNA, 13 bp, Artificial Sequence
  Description of Artificial Sequence: Synthetic primer
ctccttatagctt

SEQ ID NO: 2722 - DNA, 13 bp, Artificial Sequence
  Description of Artificial Sequence: Synthetic primer
atctcttccattt

SEQ ID NO: 2723 - DNA, 13 bp, Artificial Sequence
  Description of Artificial Sequence: Synthetic primer
cattgaaatcaca

SEQ ID NO: 2724 - DNA, 13 bp, Artificial Sequence
  Description of Artificial Sequence: Synthetic primer
tgagtgcctcaaa

SEQ ID NO: 2725 - DNA, 13 bp, Artificial Sequence
  Description of Artificial Sequence: Synthetic primer
gaggcatagtcat

SEQ ID NO: 2726 - DNA, 13 bp, Artificial Sequence
  Description of Artificial Sequence: Synthetic primer
tgaaatcaaaagt

SEQ ID NO: 2727 - DNA, 13 bp, Artificial Sequence
  Description of Artificial Sequence: Synthetic primer
ctagttctctgtg

SEQ ID NO: 2728 - DNA, 13 bp, Artificial Sequence
  Description of Artificial Sequence: Synthetic primer
ggcaggttgacct

SEQ ID NO: 2729 - DNA, 13 bp, Artificial Sequence
  Description of Artificial Sequence: Synthetic primer
actgctccaacat

SEQ ID NO: 2730 - DNA, 13 bp, Artificial Sequence
  Description of Artificial Sequence: Synthetic primer
agaacagagaggc

SEQ ID NO: 2731 - DNA, 13 bp, Artificial Sequence
  Description of Artificial Sequence: Synthetic primer
tggttctctgtga

SEQ ID NO: 2732 - DNA, 13 bp, Artificial Sequence
  Description of Artificial Sequence: Synthetic primer
tgacctattctca

SEQ ID NO: 2733 - DNA, 13 bp, Artificial Sequence
  Description of Artificial Sequence: Synthetic primer
gctgcacagccag

SEQ ID NO: 2734 - DNA, 13 bp, Artificial Sequence
  Description of Artificial Sequence: Synthetic primer
tctctgtgatcat

SEQ ID NO: 2735 - DNA, 13 bp, Artificial Sequence
  Description of Artificial Sequence: Synthetic primer
gtaaagaagaaat

SEQ ID NO: 2736 - DNA, 13 bp, Artificial Sequence
  Description of Artificial Sequence: Synthetic primer
caaaagtcatcag

SEQ ID NO: 2737 - DNA, 13 bp, Artificial Sequence
  Description of Artificial Sequence: Synthetic primer
ggcatggtcatgt

SEQ ID NO: 2738 - DNA, 13 bp, Artificial Sequence
  Description of Artificial Sequence: Synthetic primer
tgcaatctgcagg

SEQ ID NO: 2739 - DNA, 13 bp, Artificial Sequence
  Description of Artificial Sequence: Synthetic primer
agataaccaatag

SEQ ID NO: 2740 - DNA, 13 bp, Artificial Sequence
  Description of Artificial Sequence: Synthetic primer
attctgaaggtca

SEQ ID NO: 2741 - DNA, 13 bp, Artificial Sequence
  Description of Artificial Sequence: Synthetic primer
atcagccatcctt

SEQ ID NO: 2742 - DNA, 13 bp, Artificial Sequence
  Description of Artificial Sequence: Synthetic primer
tggaaccaaggcc

SEQ ID NO: 2743 - DNA, 13 bp, Artificial Sequence
  Description of Artificial Sequence: Synthetic primer
agggctcagctgc

SEQ ID NO: 2744 - DNA, 13 bp, Artificial Sequence
  Description of Artificial Sequence: Synthetic primer
ccttacgagatgg

SEQ ID NO: 2745 - DNA, 13 bp, Artificial Sequence
  Description of Artificial Sequence: Synthetic primer
gctgggcctttga

SEQ ID NO: 2746 - DNA, 13 bp, Artificial Sequence
  Description of Artificial Sequence: Synthetic primer
cagcaagctcagt

SEQ ID NO: 2747 - DNA, 13 bp, Artificial Sequence
  Description of Artificial Sequence: Synthetic primer
ctggattctatag

SEQ ID NO: 2748 - DNA, 13 bp, Artificial Sequence
  Description of Artificial Sequence: Synthetic primer
aatcctttttcag

SEQ ID NO: 2749 - DNA, 13 bp, Artificial Sequence
  Description of Artificial Sequence: Synthetic primer
tttgttcacgatt

SEQ ID NO: 2750 - DNA, 13 bp, Artificial Sequence
  Description of Artificial Sequence: Synthetic primer
ctgttgttcttta

SEQ ID NO: 2751 - DNA, 13 bp, Artificial Sequence
  Description of Artificial Sequence: Synthetic primer
tgaagaaggagct

SEQ ID NO: 2752 - DNA, 13 bp, Artificial Sequence
  Description of Artificial Sequence: Synthetic primer
ggtgttgtgtcat

SEQ ID NO: 2753 - DNA, 13 bp, Artificial Sequence
  Description of Artificial Sequence: Synthetic primer
caactgaagagtt

SEQ ID NO: 2754 - DNA, 13 bp, Artificial Sequence
  Description of Artificial Sequence: Synthetic primer
gctgcctccctgg

SEQ ID NO: 2755 - DNA, 13 bp, Artificial Sequence
  Description of Artificial Sequence: Synthetic primer
tatcaggtccatc

SEQ ID NO: 2756 - DNA, 13 bp, Artificial Sequence
  Description of Artificial Sequence: Synthetic primer
aagctacagctaa

SEQ ID NO: 2757 - DNA, 13 bp, Artificial Sequence
  Description of Artificial Sequence: Synthetic primer
ttccatgggcctt

SEQ ID NO: 2758 - DNA, 13 bp, Artificial Sequence
  Description of Artificial Sequence: Synthetic primer
tgaggcagataga

SEQ ID NO: 2759 - DNA, 13 bp, Artificial Sequence
  Description of Artificial Sequence: Synthetic primer
taggaatttcttt

SEQ ID NO: 2760 - DNA, 13 bp, Artificial Sequence
  Description of Artificial Sequence: Synthetic primer
acaggtcggtgct

SEQ ID NO: 2761 - DNA, 13 bp, Artificial Sequence
  Description of Artificial Sequence: Synthetic primer
aatctgtgtttcc

SEQ ID NO: 2762 - DNA, 13 bp, Artificial Sequence
  Description of Artificial Sequence: Synthetic primer
tctatggacagaa

SEQ ID NO: 2763 - DNA, 13 bp, Artificial Sequence
  Description of Artificial Sequence: Synthetic primer
tagctgctttagg

SEQ ID NO: 2764 - DNA, 13 bp, Artificial Sequence
  Description of Artificial Sequence: Synthetic primer
tcagatgtcatca

SEQ ID NO: 2765 - DNA, 13 bp, Artificial Sequence
  Description of Artificial Sequence: Synthetic primer
ttaaggagcctct

SEQ ID NO: 2766 - DNA, 13 bp, Artificial Sequence
  Description of Artificial Sequence: Synthetic primer
aagggtgacatgt

SEQ ID NO: 2767 - DNA, 13 bp, Artificial Sequence
  Description of Artificial Sequence: Synthetic primer
gatatgtgagggg

SEQ ID NO: 2768 - DNA, 13 bp, Artificial Sequence
  Description of Artificial Sequence: Synthetic primer
agcagagaaatgt

SEQ ID NO: 2769 - DNA, 13 bp, Artificial Sequence
  Description of Artificial Sequence: Synthetic primer
atgatagtgtcta

SEQ ID NO: 2770 - DNA, 13 bp, Artificial Sequence
  Description of Artificial Sequence: Synthetic primer
ttccaacatttga

SEQ ID NO: 2771 - DNA, 13 bp, Artificial Sequence
  Description of Artificial Sequence: Synthetic primer
catctaaatatgg

SEQ ID NO: 2772 - DNA, 13 bp, Artificial Sequence
  Description of Artificial Sequence: Synthetic primer
gctcacaccccac

SEQ ID NO: 2773 - DNA, 13 bp, Artificial Sequence
  Description of Artificial Sequence: Synthetic primer
gtcatcagactga

SEQ ID NO: 2774 - DNA, 13 bp, Artificial Sequence
  Description of Artificial Sequence: Synthetic primer
tgcatatttgttt

SEQ ID NO: 2775 - DNA, 13 bp, Artificial Sequence
  Description of Artificial Sequence: Synthetic primer
aaaaatgaaaggg

SEQ ID NO: 2776 - DNA, 13 bp, Artificial Sequence
  Description of Artificial Sequence: Synthetic primer
tgcatagtgtgtg

SEQ ID NO: 2777 - DNA, 13 bp, Artificial Sequence
  Description of Artificial Sequence: Synthetic primer
taggatggatgga

SEQ ID NO: 2778 - DNA, 13 bp, Artificial Sequence
  Description of Artificial Sequence: Synthetic primer
agttggtttggag

SEQ ID NO: 2779 - DNA, 13 bp, Artificial Sequence
  Description of Artificial Sequence: Synthetic primer
agggtatgcaatt

SEQ ID NO: 2780 - DNA, 13 bp, Artificial Sequence
  Description of Artificial Sequence: Synthetic primer
ttgtccgatcaac

SEQ ID NO: 2781 - DNA, 13 bp, Artificial Sequence
  Description of Artificial Sequence: Synthetic primer
aagaagtgcactg

SEQ ID NO: 2782 - DNA, 13 bp, Artificial Sequence
  Description of Artificial Sequence: Synthetic primer
agacaaggaatga

SEQ ID NO: 2783 - DNA, 13 bp, Artificial Sequence
  Description of Artificial Sequence: Synthetic primer
aaagccatcattg

SEQ ID NO: 2784 - DNA, 13 bp, Artificial Sequence
  Description of Artificial Sequence: Synthetic primer
gtgatgaagacac

SEQ ID NO: 2785 - DNA, 13 bp, Artificial Sequence
  Description of Artificial Sequence: Synthetic primer
gtggaggatgggg

SEQ ID NO: 2786 - DNA, 13 bp, Artificial Sequence
  Description of Artificial Sequence: Synthetic primer
ctctgcatatagt

SEQ ID NO: 2787 - DNA, 13 bp, Artificial Sequence
  Description of Artificial Sequence: Synthetic primer
atctcagaaacag

SEQ ID NO: 2788 - DNA, 13 bp, Artificial Sequence
  Description of Artificial Sequence: Synthetic primer
aagggggtcaagg

SEQ ID NO: 2789 - DNA, 13 bp, Artificial Sequence
  Description of Artificial Sequence: Synthetic primer
acaaagacggtgc

SEQ ID NO: 2790 - DNA, 13 bp, Artificial Sequence
  Description of Artificial Sequence: Synthetic primer
aaaccaagttctt

SEQ ID NO: 2791 - DNA, 13 bp, Artificial Sequence
  Description of Artificial Sequence: Synthetic primer
gaccagggaaggg

SEQ ID NO: 2792 - DNA, 13 bp, Artificial Sequence
  Description of Artificial Sequence: Synthetic primer
ggttattagagtg

SEQ ID NO: 2793 - DNA, 13 bp, Artificial Sequence
  Description of Artificial Sequence: Synthetic primer
ggaccaaacaaag

SEQ ID NO: 2794 - DNA, 13 bp, Artificial Sequence
  Description of Artificial Sequence: Synthetic primer
gcttcaatgtgaa

SEQ ID NO: 2795 - DNA, 13 bp, Artificial Sequence
  Description of Artificial Sequence: Synthetic primer
gggacaaaagatc

SEQ ID NO: 2796 - DNA, 13 bp, Artificial Sequence
  Description of Artificial Sequence: Synthetic primer
aaagagaaactcg

SEQ ID NO: 2797 - DNA, 13 bp, Artificial Sequence
  Description of Artificial Sequence: Synthetic primer
agccaggaattat

SEQ ID NO: 2798 - DNA, 13 bp, Artificial Sequence
  Description of Artificial Sequence: Synthetic primer
ccctagtgcttat

SEQ ID NO: 2799 - DNA, 13 bp, Artificial Sequence
  Description of Artificial Sequence: Synthetic primer
tgatggggagaaa

SEQ ID NO: 2800 - DNA, 13 bp, Artificial Sequence
  Description of Artificial Sequence: Synthetic primer
ctcctcttctcat

SEQ ID NO: 2801 - DNA, 13 bp, Artificial Sequence
  Description of Artificial Sequence: Synthetic primer
cttggagactttg

SEQ ID NO: 2802 - DNA, 13 bp, Artificial Sequence
  Description of Artificial Sequence: Synthetic primer
actcctttgttgg

SEQ ID NO: 2803 - DNA, 13 bp, Artificial Sequence
  Description of Artificial Sequence: Synthetic primer
ggtatgcagggga

SEQ ID NO: 2804 - DNA, 13 bp, Artificial Sequence
  Description of Artificial Sequence: Synthetic primer
cgtccatggttgt

SEQ ID NO: 2805 - DNA, 13 bp, Artificial Sequence
  Description of Artificial Sequence: Synthetic primer
gactttgcatcaa

SEQ ID NO: 2806 - DNA, 13 bp, Artificial Sequence
  Description of Artificial Sequence: Synthetic primer
atgatctagagga

SEQ ID NO: 2807 - DNA, 13 bp, Artificial Sequence
  Description of Artificial Sequence: Synthetic primer
aaagctttcaaga

SEQ ID NO: 2808 - DNA, 13 bp, Artificial Sequence
  Description of Artificial Sequence: Synthetic primer
gtagcactatgct

SEQ ID NO: 2809 - DNA, 13 bp, Artificial Sequence
  Description of Artificial Sequence: Synthetic primer
tcacccagcagtt

SEQ ID NO: 2810 - DNA, 13 bp, Artificial Sequence
  Description of Artificial Sequence: Synthetic primer
tctgggcctgttc

SEQ ID NO: 2811 - DNA, 13 bp, Artificial Sequence
  Description of Artificial Sequence: Synthetic primer
ggaagctgattag

SEQ ID NO: 2812 - DNA, 13 bp, Artificial Sequence
  Description of Artificial Sequence: Synthetic primer
catccttcttctt

SEQ ID NO: 2813 - DNA, 13 bp, Artificial Sequence
  Description of Artificial Sequence: Synthetic primer
gatccatcacaaa

SEQ ID NO: 2814 - DNA, 13 bp, Artificial Sequence
  Description of Artificial Sequence: Synthetic primer
ggttgtcttctgc

SEQ ID NO: 2815 - DNA, 13 bp, Artificial Sequence
  Description of Artificial Sequence: Synthetic primer
acacaggcccctt

SEQ ID NO: 2816 - DNA, 13 bp, Artificial Sequence
  Description of Artificial Sequence: Synthetic primer
gaacctcatactt

SEQ ID NO: 2817 - DNA, 13 bp, Artificial Sequence
  Description of Artificial Sequence: Synthetic primer
aactcatgcattc

SEQ ID NO: 2818 - DNA, 13 bp, Artificial Sequence
  Description of Artificial Sequence: Synthetic primer
aattttctttagc

SEQ ID NO: 2819 - DNA, 13 bp, Artificial Sequence
  Description of Artificial Sequence: Synthetic primer
gaataatatatct

SEQ ID NO: 2820 - DNA, 13 bp, Artificial Sequence
  Description of Artificial Sequence: Synthetic primer
tgaccaatttatt

SEQ ID NO: 2821 - DNA, 13 bp, Artificial Sequence
  Description of Artificial Sequence: Synthetic primer
ggcttttgctgga

SEQ ID NO: 2822 - DNA, 13 bp, Artificial Sequence
  Description of Artificial Sequence: Synthetic primer
ctgaagtcattag

SEQ ID NO: 2823 - DNA, 13 bp, Artificial Sequence
  Description of Artificial Sequence: Synthetic primer
ctctccccatctt

SEQ ID NO: 2824 - DNA, 13 bp, Artificial Sequence
  Description of Artificial Sequence: Synthetic primer
tctttccctcaga

SEQ ID NO: 2825 - DNA, 13 bp, Artificial Sequence
  Description of Artificial Sequence: Synthetic primer
gcaaatcagttct

SEQ ID NO: 2826 - DNA, 13 bp, Artificial Sequence
  Description of Artificial Sequence: Synthetic primer
ctttatcacaaga

SEQ ID NO: 2827 - DNA, 13 bp, Artificial Sequence
  Description of Artificial Sequence: Synthetic primer
atgcattgttctt

SEQ ID NO: 2828 - DNA, 13 bp, Artificial Sequence
  Description of Artificial Sequence: Synthetic primer
cccatgtatgagg

SEQ ID NO: 2829 - DNA, 13 bp, Artificial Sequence
  Description of Artificial Sequence: Synthetic primer
ctgtctcctcata

SEQ ID NO: 2830 - DNA, 13 bp, Artificial Sequence
  Description of Artificial Sequence: Synthetic primer
ctctatggtatct

SEQ ID NO: 2831 - DNA, 13 bp, Artificial Sequence
  Description of Artificial Sequence: Synthetic primer
gggcatccaaatg

SEQ ID NO: 2832 - DNA, 13 bp, Artificial Sequence
  Description of Artificial Sequence: Synthetic primer
caactccataata

SEQ ID NO: 2833 - DNA, 13 bp, Artificial Sequence
  Description of Artificial Sequence: Synthetic primer
gaaagtgcttgag

SEQ ID NO: 2834 - DNA, 13 bp, Artificial Sequence
  Description of Artificial Sequence: Synthetic primer
tttcagctgacac

SEQ ID NO: 2835 - DNA, 13 bp, Artificial Sequence
  Description of Artificial Sequence: Synthetic primer
aaccccataatag

SEQ ID NO: 2836 - DNA, 13 bp, Artificial Sequence
  Description of Artificial Sequence: Synthetic primer
ccgccacatctgt

SEQ ID NO: 2837 - DNA, 13 bp, Artificial Sequence
  Description of Artificial Sequence: Synthetic primer
tgtcctttactcc

SEQ ID NO: 2838 - DNA, 13 bp, Artificial Sequence
  Description of Artificial Sequence: Synthetic primer
tcctgaatgaatg

SEQ ID NO: 2839 - DNA, 13 bp, Artificial Sequence
  Description of Artificial Sequence: Synthetic primer
gaccgcccaatat

SEQ ID NO: 2840 - DNA, 13 bp, Artificial Sequence
  Description of Artificial Sequence: Synthetic primer
ctctgggctgcca

SEQ ID NO: 2841 - DNA, 13 bp, Artificial Sequence
  Description of Artificial Sequence: Synthetic primer
cattgctgcagag

SEQ ID NO: 2842 - DNA, 13 bp, Artificial Sequence
  Description of Artificial Sequence: Synthetic primer
caaagaccggtgc

SEQ ID NO: 2843 - DNA, 13 bp, Artificial Sequence
  Description of Artificial Sequence: Synthetic primer
ttgtgcaaggctc

SEQ ID NO: 2844 - DNA, 13 bp, Artificial Sequence
  Description of Artificial Sequence: Synthetic primer
cagcctttgcaat

SEQ ID NO: 2845 - DNA, 13 bp, Artificial Sequence
  Description of Artificial Sequence: Synthetic primer
aaccagtcaaaga

SEQ ID NO: 2846 - DNA, 13 bp, Artificial Sequence
  Description of Artificial Sequence: Synthetic primer
ttcctgtggatgt

SEQ ID NO: 2847 - DNA, 13 bp, Artificial Sequence
  Description of Artificial Sequence: Synthetic primer
ccaacaaatgaaa

SEQ ID NO: 2848 - DNA, 13 bp, Artificial Sequence
  Description of Artificial Sequence: Synthetic primer
ccagtgagaggct

SEQ ID NO: 2849 - DNA, 13 bp, Artificial Sequence
  Description of Artificial Sequence: Synthetic primer
catcatcctcact

SEQ ID NO: 2850 - DNA, 13 bp, Artificial Sequence
  Description of Artificial Sequence: Synthetic primer
tgccaaagcaaaa

SEQ ID NO: 2851 - DNA, 13 bp, Artificial Sequence
  Description of Artificial Sequence: Synthetic primer
atgctgtgccaga

SEQ ID NO: 2852 - DNA, 13 bp, Artificial Sequence
  Description of Artificial Sequence: Synthetic primer
tgagctccctctt

SEQ ID NO: 2853 - DNA, 13 bp, Artificial Sequence
  Description of Artificial Sequence: Synthetic primer
gcaaccatcttct

SEQ ID NO: 2854 - DNA, 13 bp, Artificial Sequence
  Description of Artificial Sequence: Synthetic primer
actattttggagc

SEQ ID NO: 2855 - DNA, 13 bp, Artificial Sequence
  Description of Artificial Sequence: Synthetic primer
tcaatcagatttg

SEQ ID NO: 2856 - DNA, 13 bp, Artificial Sequence
  Description of Artificial Sequence: Synthetic primer
cctatctgtacaa

SEQ ID NO: 2857 - DNA, 13 bp, Artificial Sequence
  Description of Artificial Sequence: Synthetic primer
acaatatttacat

SEQ ID NO: 2858 - DNA, 13 bp, Artificial Sequence
  Description of Artificial Sequence: Synthetic primer
ccctctcaaagac

SEQ ID NO: 2859 - DNA, 13 bp, Artificial Sequence
  Description of Artificial Sequence: Synthetic primer
tgctgcctcaccc

SEQ ID NO: 2860 - DNA, 13 bp, Artificial Sequence
  Description of Artificial Sequence: Synthetic primer
ctgccactctggc

SEQ ID NO: 2861 - DNA, 13 bp, Artificial Sequence
  Description of Artificial Sequence: Synthetic primer
gcttatctgtaca

SEQ ID NO: 2862 - DNA, 13 bp, Artificial Sequence
  Description of Artificial Sequence: Synthetic primer
gggcagtgagcta

SEQ ID NO: 2863 - DNA, 13 bp, Artificial Sequence
  Description of Artificial Sequence: Synthetic primer
tatcaaagctttt

SEQ ID NO: 2864 - DNA, 13 bp, Artificial Sequence
  Description of Artificial Sequence: Synthetic primer
gccacattttaga

SEQ ID NO: 2865 - DNA, 13 bp, Artificial Sequence
  Description of Artificial Sequence: Synthetic primer
cacaaagctccct

SEQ ID NO: 2866 - DNA, 13 bp, Artificial Sequence
  Description of Artificial Sequence: Synthetic primer
ggatgatgatgaa

SEQ ID NO: 2867 - DNA, 13 bp, Artificial Sequence
  Description of Artificial Sequence: Synthetic primer
tcattgctagagt

SEQ ID NO: 2868 - DNA, 13 bp, Artificial Sequence
  Description of Artificial Sequence: Synthetic primer
tctcctccataag

SEQ ID NO: 2869 - DNA, 13 bp, Artificial Sequence
  Description of Artificial Sequence: Synthetic primer
tttgctggcatgg

SEQ ID NO: 2870 - DNA, 13 bp, Artificial Sequence
  Description of Artificial Sequence: Synthetic primer
ctgtcatggcagc

SEQ ID NO: 2871 - DNA, 13 bp, Artificial Sequence
  Description of Artificial Sequence: Synthetic primer
tcagctgctgtca

SEQ ID NO: 2872 - DNA, 13 bp, Artificial Sequence
  Description of Artificial Sequence: Synthetic primer
cccttctctacca

SEQ ID NO: 2873 - DNA, 13 bp, Artificial Sequence
  Description of Artificial Sequence: Synthetic primer
gtccgagagtttg

SEQ ID NO: 2874 - DNA, 13 bp, Artificial Sequence
  Description of Artificial Sequence: Synthetic primer
cccacgttgacac

SEQ ID NO: 2875 - DNA, 13 bp, Artificial Sequence
  Description of Artificial Sequence: Synthetic primer
aaatgaaagatag

SEQ ID NO: 2876 - DNA, 13 bp, Artificial Sequence
  Description of Artificial Sequence: Synthetic primer
ggcttgaaaagat

SEQ ID NO: 2877 - DNA, 13 bp, Artificial Sequence
  Description of Artificial Sequence: Synthetic primer
tttatcagaaggt

SEQ ID NO: 2878 - DNA, 13 bp, Artificial Sequence
  Description of Artificial Sequence: Synthetic primer
gcatctcagttgt

SEQ ID NO: 2879 - DNA, 13 bp, Artificial Sequence
  Description of Artificial Sequence: Synthetic primer
aaaaaccatttga

SEQ ID NO: 2880 - DNA, 13 bp, Artificial Sequence
  Description of Artificial Sequence: Synthetic primer
gaagacataggct

SEQ ID NO: 2881 - DNA, 13 bp, Artificial Sequence
  Description of Artificial Sequence: Synthetic primer
cttggatgagcaa

SEQ ID NO: 2882 - DNA, 13 bp, Artificial Sequence
  Description of Artificial Sequence: Synthetic primer
acaacatcagatg

SEQ ID NO: 2883 - DNA, 13 bp, Artificial Sequence
  Description of Artificial Sequence: Synthetic primer
gtgacagaaagaa

SEQ ID NO: 2884 - DNA, 13 bp, Artificial Sequence
  Description of Artificial Sequence: Synthetic primer
ttcaccatgcaac

SEQ ID NO: 2885 - DNA, 13 bp, Artificial Sequence
  Description of Artificial Sequence: Synthetic primer
gagaaaaatttcc

SEQ ID NO: 2886 - DNA, 13 bp, Artificial Sequence
  Description of Artificial Sequence: Synthetic primer
gaagagggaatct

SEQ ID NO: 2887 - DNA, 13 bp, Artificial Sequence
  Description of Artificial Sequence: Synthetic primer
aacattgcaagac

SEQ ID NO: 2888 - DNA, 13 bp, Artificial Sequence
  Description of Artificial Sequence: Synthetic primer
acaccttatgaag

SEQ ID NO: 2889 - DNA, 13 bp, Artificial Sequence
  Description of Artificial Sequence: Synthetic primer
taacttctcggct

SEQ ID NO: 2890 - DNA, 13 bp, Artificial Sequence
  Description of Artificial Sequence: Synthetic primer
gcagtcaaaccta

SEQ ID NO: 2891 - DNA, 13 bp, Artificial Sequence
  Description of Artificial Sequence: Synthetic primer
taggaaatgaact

SEQ ID NO: 2892 - DNA, 13 bp, Artificial Sequence
  Description of Artificial Sequence: Synthetic primer
aactgtcacccca

SEQ ID NO: 2893 - DNA, 13 bp, Artificial Sequence
  Description of Artificial Sequence: Synthetic primer
gatgcaagcacat

SEQ ID NO: 2894 - DNA, 13 bp, Artificial Sequence
  Description of Artificial Sequence: Synthetic primer
ctgaatcatgcat

SEQ ID NO: 2895 - DNA, 13 bp, Artificial Sequence
  Description of Artificial Sequence: Synthetic primer
atatgctttggga

SEQ ID NO: 2896 - DNA, 13 bp, Artificial Sequence
  Description of Artificial Sequence: Synthetic primer
agtggggacatgg

SEQ ID NO: 2897 - DNA, 13 bp, Artificial Sequence
  Description of Artificial Sequence: Synthetic primer
agcagcagtgtga

SEQ ID NO: 2898 - DNA, 13 bp, Artificial Sequence
  Description of Artificial Sequence: Synthetic primer
caaggtcatttat

SEQ ID NO: 2899 - DNA, 13 bp, Artificial Sequence
  Description of Artificial Sequence: Synthetic primer
ttgagccttcaaa

SEQ ID NO: 2900 - DNA, 13 bp, Artificial Sequence
  Description of Artificial Sequence: Synthetic primer
aaacttgggtttt

SEQ ID NO: 2901 - DNA, 13 bp, Artificial Sequence
  Description of Artificial Sequence: Synthetic primer
ctttctatttgaa

SEQ ID NO: 2902 - DNA, 13 bp, Artificial Sequence
  Description of Artificial Sequence: Synthetic primer
agatgaacaggag

SEQ ID NO: 2903 - DNA, 13 bp, Artificial Sequence
  Description of Artificial Sequence: Synthetic primer
taaaatatcccac

SEQ ID NO: 2904 - DNA, 13 bp, Artificial Sequence
  Description of Artificial Sequence: Synthetic primer
agcatctctgaag

SEQ ID NO: 2905 - DNA, 13 bp, Artificial Sequence
  Description of Artificial Sequence: Synthetic primer
cctgatgacacct

SEQ ID NO: 2906 - DNA, 13 bp, Artificial Sequence
  Description of Artificial Sequence: Synthetic primer
aaccttcagttct

SEQ ID NO: 2907 - DNA, 13 bp, Artificial Sequence
  Description of Artificial Sequence: Synthetic primer
actcacctacaga

SEQ ID NO: 2908 - DNA, 13 bp, Artificial Sequence
  Description of Artificial Sequence: Synthetic primer
tgtttacagctgt

SEQ ID NO: 2909 - DNA, 13 bp, Artificial Sequence
  Description of Artificial Sequence: Synthetic primer
accatctagatgt

SEQ ID NO: 2910 - DNA, 13 bp, Artificial Sequence
  Description of Artificial Sequence: Synthetic primer
cacaacatcaaac

SEQ ID NO: 2911 - DNA, 13 bp, Artificial Sequence
  Description of Artificial Sequence: Synthetic primer
ctatcgtgatagt

SEQ ID NO: 2912 - DNA, 13 bp, Artificial Sequence
  Description of Artificial Sequence: Synthetic primer
ttgcaaactgcta

SEQ ID NO: 2913 - DNA, 13 bp, Artificial Sequence
  Description of Artificial Sequence: Synthetic primer
gtgttcactttga

SEQ ID NO: 2914 - DNA, 13 bp, Artificial Sequence
  Description of Artificial Sequence: Synthetic primer
gaaacaaggcagc

SEQ ID NO: 2915 - DNA, 13 bp, Artificial Sequence
  Description of Artificial Sequence: Synthetic primer
tagtgatgccata

SEQ ID NO: 2916 - DNA, 13 bp, Artificial Sequence
  Description of Artificial Sequence: Synthetic primer
aaacgagattctg

SEQ ID NO: 2917 - DNA, 13 bp, Artificial Sequence
  Description of Artificial Sequence: Synthetic primer
ctatccttaatgt

SEQ ID NO: 2918 - DNA, 13 bp, Artificial Sequence
  Description of Artificial Sequence: Synthetic primer
aactagaaagctt

SEQ ID NO: 2919 - DNA, 13 bp, Artificial Sequence
  Description of Artificial Sequence: Synthetic primer
aatatgacctctg

SEQ ID NO: 2920 - DNA, 13 bp, Artificial Sequence
  Description of Artificial Sequence: Synthetic primer
ggaacttcttaaa

SEQ ID NO: 2921 - DNA, 13 bp, Artificial Sequence
  Description of Artificial Sequence: Synthetic primer
actaccgtgacag

SEQ ID NO: 2922 - DNA, 13 bp, Artificial Sequence
  Description of Artificial Sequence: Synthetic primer
aaggtctaactga

SEQ ID NO: 2923 - DNA, 13 bp, Artificial Sequence
  Description of Artificial Sequence: Synthetic primer
atggaagtggaga

SEQ ID NO: 2924 - DNA, 13 bp, Artificial Sequence
  Description of Artificial Sequence: Synthetic primer
caacttaaatctt

SEQ ID NO: 2925 - DNA, 13 bp, Artificial Sequence
  Description of Artificial Sequence: Synthetic primer
cacagctcttaat

SEQ ID NO: 2926 - DNA, 13 bp, Artificial Sequence
  Description of Artificial Sequence: Synthetic primer
cttctcctcaacg

SEQ ID NO: 2927 - DNA, 13 bp, Artificial Sequence
  Description of Artificial Sequence: Synthetic primer
tgcttgaccatct

SEQ ID NO: 2928 - DNA, 13 bp, Artificial Sequence
  Description of Artificial Sequence: Synthetic primer
ctagaaggtcact

SEQ ID NO: 2929 - DNA, 13 bp, Artificial Sequence
  Description of Artificial Sequence: Synthetic primer
ttcaaggtgcaaa

SEQ ID NO: 2930 - DNA, 13 bp, Artificial Sequence
  Description of Artificial Sequence: Synthetic primer
tcagacttggaac

SEQ ID NO: 2931 - DNA, 13 bp, Artificial Sequence
  Description of Artificial Sequence: Synthetic primer
acagagagctcta

SEQ ID NO: 2932 - DNA, 13 bp, Artificial Sequence
  Description of Artificial Sequence: Synthetic primer
agcattagccctg

SEQ ID NO: 2933 - DNA, 13 bp, Artificial Sequence
  Description of Artificial Sequence: Synthetic primer
tgaagaggtacat

SEQ ID NO: 2934 - DNA, 13 bp, Artificial Sequence
  Description of Artificial Sequence: Synthetic primer
gggttagcatctc

SEQ ID NO: 2935 - DNA, 13 bp, Artificial Sequence
  Description of Artificial Sequence: Synthetic primer
cataacatcaaac

SEQ ID NO: 2936 - DNA, 13 bp, Artificial Sequence
  Description of Artificial Sequence: Synthetic primer
agtgaagtatgct

SEQ ID NO: 2937 - DNA, 13 bp, Artificial Sequence
  Description of Artificial Sequence: Synthetic primer
gcaacatggagct

SEQ ID NO: 2938 - DNA, 13 bp, Artificial Sequence
  Description of Artificial Sequence: Synthetic primer
tgcactctggaca

SEQ ID NO: 2939 - DNA, 13 bp, Artificial Sequence
  Description of Artificial Sequence: Synthetic primer
gatatttgagccc

SEQ ID NO: 2940 - DNA, 13 bp, Artificial Sequence
  Description of Artificial Sequence: Synthetic primer
cacatgaggttta

SEQ ID NO: 2941 - DNA, 13 bp, Artificial Sequence
  Description of Artificial Sequence: Synthetic primer
ctgagtcatgtat

SEQ ID NO: 2942 - DNA, 13 bp, Artificial Sequence
  Description of Artificial Sequence: Synthetic primer
ctttgtgtgcttt

SEQ ID NO: 2943 - DNA, 13 bp, Artificial Sequence
  Description of Artificial Sequence: Synthetic primer
tcaacaatgtgct

SEQ ID NO: 2944 - DNA, 13 bp, Artificial Sequence
  Description of Artificial Sequence: Synthetic primer
ggtctgtttgcaa

SEQ ID NO: 2945 - DNA, 13 bp, Artificial Sequence
  Description of Artificial Sequence: Synthetic primer
tcttcaacaagct

SEQ ID NO: 2946 - DNA, 13 bp, Artificial Sequence
  Description of Artificial Sequence: Synthetic primer
actctgttctgac

SEQ ID NO: 2947 - DNA, 13 bp, Artificial Sequence
  Description of Artificial Sequence: Synthetic primer
agtgacagaaagg

SEQ ID NO: 2948 - DNA, 13 bp, Artificial Sequence
  Description of Artificial Sequence: Synthetic primer
agaagtaaggtca

SEQ ID NO: 2949 - DNA, 13 bp, Artificial Sequence
  Description of Artificial Sequence: Synthetic primer
ctctctgatactg

SEQ ID NO: 2950 - DNA, 13 bp, Artificial Sequence
  Description of Artificial Sequence: Synthetic primer
tcactctgatcaa

SEQ ID NO: 2951 - DNA, 13 bp, Artificial Sequence
  Description of Artificial Sequence: Synthetic primer
aagacagtagcag

SEQ ID NO: 2952 - DNA, 13 bp, Artificial Sequence
  Description of Artificial Sequence: Synthetic primer
tacggactacaag

SEQ ID NO: 2953 - DNA, 13 bp, Artificial Sequence
  Description of Artificial Sequence: Synthetic primer
taagttaacattc

SEQ ID NO: 2954 - DNA, 13 bp, Artificial Sequence
  Description of Artificial Sequence: Synthetic primer
gaagacatttcac

SEQ ID NO: 2955 - DNA, 13 bp, Artificial Sequence
  Description of Artificial Sequence: Synthetic primer
tcttcagtgttaa

SEQ ID NO: 2956 - DNA, 13 bp, Artificial Sequence
  Description of Artificial Sequence: Synthetic primer
attatggaaacag

SEQ ID NO: 2957 - DNA, 13 bp, Artificial Sequence
  Description of Artificial Sequence: Synthetic primer
tgtcaggcatcga

SEQ ID NO: 2958 - DNA, 13 bp, Artificial Sequence
  Description of Artificial Sequence: Synthetic primer
ctgaatcatgctc

SEQ ID NO: 2959 - DNA, 13 bp, Artificial Sequence
  Description of Artificial Sequence: Synthetic primer
acctgcagacatc

SEQ ID NO: 2960 - DNA, 13 bp, Artificial Sequence
  Description of Artificial Sequence: Synthetic primer
atgttgaagattt

SEQ ID NO: 2961 - DNA, 13 bp, Artificial Sequence
  Description of Artificial Sequence: Synthetic primer
aacaaactctcta

SEQ ID NO: 2962 - DNA, 13 bp, Artificial Sequence
  Description of Artificial Sequence: Synthetic primer
tcccttcagtgtt

SEQ ID NO: 2963 - DNA, 13 bp, Artificial Sequence
  Description of Artificial Sequence: Synthetic primer
gggtttgtttgcc

SEQ ID NO: 2964 - DNA, 13 bp, Artificial Sequence
  Description of Artificial Sequence: Synthetic primer
aggtgcagagcca

SEQ ID NO: 2965 - DNA, 13 bp, Artificial Sequence
  Description of Artificial Sequence: Synthetic primer
aaccatttgaatt

SEQ ID NO: 2966 - DNA, 13 bp, Artificial Sequence
  Description of Artificial Sequence: Synthetic primer
agagatgctgtca

SEQ ID NO: 2967 - DNA, 13 bp, Artificial Sequence
  Description of Artificial Sequence: Synthetic primer
tgatatttagcga

SEQ ID NO: 2968 - DNA, 13 bp, Artificial Sequence
  Description of Artificial Sequence: Synthetic primer
tgaactgagttct

SEQ ID NO: 2969 - DNA, 13 bp, Artificial Sequence
  Description of Artificial Sequence: Synthetic primer
agttaacttctcg

SEQ ID NO: 2970 - DNA, 13 bp, Artificial Sequence
  Description of Artificial Sequence: Synthetic primer
gttatctaaactg

SEQ ID NO: 2971 - DNA, 13 bp, Artificial Sequence
  Description of Artificial Sequence: Synthetic primer
caatatactgctc

SEQ ID NO: 2972 - DNA, 13 bp, Artificial Sequence
  Description of Artificial Sequence: Synthetic primer
tgaagcagcagca

SEQ ID NO: 2973 - DNA, 13 bp, Artificial Sequence
  Description of Artificial Sequence: Synthetic primer
gaatgagcttttg

SEQ ID NO: 2974 - DNA, 13 bp, Artificial Sequence
  Description of Artificial Sequence: Synthetic primer
ggaaatttagagt

SEQ ID NO: 2975 - DNA, 13 bp, Artificial Sequence
  Description of Artificial Sequence: Synthetic primer
agctttagtagtg

SEQ ID NO: 2976 - DNA, 13 bp, Artificial Sequence
  Description of Artificial Sequence: Synthetic primer
tgatgccgaaagt

SEQ ID NO: 2977 - DNA, 13 bp, Artificial Sequence
  Description of Artificial Sequence: Synthetic primer
atcttcagttctc

SEQ ID NO: 2978 - DNA, 13 bp, Artificial Sequence
  Description of Artificial Sequence: Synthetic primer
aaatatcctacag

SEQ ID NO: 2979 - DNA, 13 bp, Artificial Sequence
  Description of Artificial Sequence: Synthetic primer
tgcgaaaactgtc

SEQ ID NO: 2980 - DNA, 13 bp, Artificial Sequence
  Description of Artificial Sequence: Synthetic primer
agagacaagtact

SEQ ID NO: 2981 - DNA, 13 bp, Artificial Sequence
  Description of Artificial Sequence: Synthetic primer
gccagccactgta

SEQ ID NO: 2982 - DNA, 13 bp, Artificial Sequence
  Description of Artificial Sequence: Synthetic primer
ttcttcccttctg

SEQ ID NO: 2983 - DNA, 13 bp, Artificial Sequence
  Description of Artificial Sequence: Synthetic primer
caacttcagacga

SEQ ID NO: 2984 - DNA, 13 bp, Artificial Sequence
  Description of Artificial Sequence: Synthetic primer
gctaggaggtcat

SEQ ID NO: 2985 - DNA, 13 bp, Artificial Sequence
  Description of Artificial Sequence: Synthetic primer
ttgcgattggcta

SEQ ID NO: 2986 - DNA, 13 bp, Artificial Sequence
  Description of Artificial Sequence: Synthetic primer
ctgtttgacctga

SEQ ID NO: 2987 - DNA, 13 bp, Artificial Sequence
  Description of Artificial Sequence: Synthetic primer
agcagtcaaaccc

SEQ ID NO: 2988 - DNA, 13 bp, Artificial Sequence
  Description of Artificial Sequence: Synthetic primer
tgaaccctcaaag

SEQ ID NO: 2989 - DNA, 13 bp, Artificial Sequence
  Description of Artificial Sequence: Synthetic primer
cccagtgatgcca

SEQ ID NO: 2990 - DNA, 13 bp, Artificial Sequence
  Description of Artificial Sequence: Synthetic primer
tgacaggcaggtc

SEQ ID NO: 2991 - DNA, 13 bp, Artificial Sequence
  Description of Artificial Sequence: Synthetic primer
gatcactcatatc

SEQ ID NO: 2992 - DNA, 13 bp, Artificial Sequence
  Description of Artificial Sequence: Synthetic primer
cagtacgtaagtg

SEQ ID NO: 2993 - DNA, 13 bp, Artificial Sequence
  Description of Artificial Sequence: Synthetic primer
agagttgcacaca

SEQ ID NO: 2994 - DNA, 13 bp, Artificial Sequence
  Description of Artificial Sequence: Synthetic primer
actgcaaacatag

SEQ ID NO: 2995 - DNA, 13 bp, Artificial Sequence
  Description of Artificial Sequence: Synthetic primer
aacattgaaactg

SEQ ID NO: 2996 - DNA, 13 bp, Artificial Sequence
  Description of Artificial Sequence: Synthetic primer
actgcatatcaag

SEQ ID NO: 2997 - DNA, 13 bp, Artificial Sequence
  Description of Artificial Sequence: Synthetic primer
ggtgtaagagaaa

SEQ ID NO: 2998 - DNA, 13 bp, Artificial Sequence
  Description of Artificial Sequence: Synthetic primer
tctgccaaatgtt

SEQ ID NO: 2999 - DNA, 13 bp, Artificial Sequence
  Description of Artificial Sequence: Synthetic primer
atgaaccagatga

SEQ ID NO: 3000 - DNA, 13 bp, Artificial Sequence
  Description of Artificial Sequence: Synthetic primer
gacacctcaaaga

SEQ ID NO: 3001 - DNA, 13 bp, Artificial Sequence
  Description of Artificial Sequence: Synthetic primer
gtgaggcttcctc

SEQ ID NO: 3002 - DNA, 13 bp, Artificial Sequence
  Description of Artificial Sequence: Synthetic primer
ataattggaaagc

SEQ ID NO: 3003 - DNA, 13 bp, Artificial Sequence
  Description of Artificial Sequence: Synthetic primer
catatcagaccag

SEQ ID NO: 3004 - DNA, 13 bp, Artificial Sequence
  Description of Artificial Sequence: Synthetic primer
ggcatgtgacaca

SEQ ID NO: 3005 - DNA, 13 bp, Artificial Sequence
  Description of Artificial Sequence: Synthetic primer
agagaaattcacc

SEQ ID NO: 3006 - DNA, 13 bp, Artificial Sequence
  Description of Artificial Sequence: Synthetic primer
gggccacgtaaaa

SEQ ID NO: 3007 - DNA, 13 bp, Artificial Sequence
  Description of Artificial Sequence: Synthetic primer
ctcttctggttca

SEQ ID NO: 3008 - DNA, 13 bp, Artificial Sequence
  Description of Artificial Sequence: Synthetic primer
tggaaggttgaat

SEQ ID NO: 3009 - DNA, 13 bp, Artificial Sequence
  Description of Artificial Sequence: Synthetic primer
acctgacaaattt

SEQ ID NO: 3010 - DNA, 13 bp, Artificial Sequence
  Description of Artificial Sequence: Synthetic primer
agtacttatcagg

SEQ ID NO: 3011 - DNA, 13 bp, Artificial Sequence
  Description of Artificial Sequence: Synthetic primer
cctcagcacagcc

SEQ ID NO: 3012 - DNA, 13 bp, Artificial Sequence
  Description of Artificial Sequence: Synthetic primer
aggggccatgtga

SEQ ID NO: 3013 - DNA, 13 bp, Artificial Sequence
  Description of Artificial Sequence: Synthetic primer
agtccatccagca

SEQ ID NO: 3014 - DNA, 13 bp, Artificial Sequence
  Description of Artificial Sequence: Synthetic primer
ttcatgtagatga

SEQ ID NO: 3015 - DNA, 13 bp, Artificial Sequence
  Description of Artificial Sequence: Synthetic primer
gaagacctaacaa

SEQ ID NO: 3016 - DNA, 13 bp, Artificial Sequence
  Description of Artificial Sequence: Synthetic primer
tgcacttgagcat

SEQ ID NO: 3017 - DNA, 13 bp, Artificial Sequence
  Description of Artificial Sequence: Synthetic primer
gaagaatggccca

SEQ ID NO: 3018 - DNA, 13 bp, Artificial Sequence
  Description of Artificial Sequence: Synthetic primer
gcatcaagattga

SEQ ID NO: 3019 - DNA, 13 bp, Artificial Sequence
  Description of Artificial Sequence: Synthetic primer
tcttttggttcag

SEQ ID NO: 3020 - DNA, 13 bp, Artificial Sequence
  Description of Artificial Sequence: Synthetic primer
cagaggccatagt

SEQ ID NO: 3021 - DNA, 13 bp, Artificial Sequence
  Description of Artificial Sequence: Synthetic primer
taatcggaaagca

SEQ ID NO: 3022 - DNA, 13 bp, Artificial Sequence
  Description of Artificial Sequence: Synthetic primer
tggattgtgcttc

SEQ ID NO: 3023 - DNA, 13 bp, Artificial Sequence
  Description of Artificial Sequence: Synthetic primer
tgcaagagaaatc

SEQ ID NO: 3024 - DNA, 13 bp, Artificial Sequence
  Description of Artificial Sequence: Synthetic primer
aagccacccgcga

SEQ ID NO: 3025 - DNA, 13 bp, Artificial Sequence
  Description of Artificial Sequence: Synthetic primer
acaagtagaagag

SEQ ID NO: 3026 - DNA, 13 bp, Artificial Sequence
  Description of Artificial Sequence: Synthetic primer
catctcaaagacg

SEQ ID NO: 3027 - DNA, 13 bp, Artificial Sequence
  Description of Artificial Sequence: Synthetic primer
ctgtcacaccgga

SEQ ID NO: 3028 - DNA, 13 bp, Artificial Sequence
  Description of Artificial Sequence: Synthetic primer
agcacagccccac

SEQ ID NO: 3029 - DNA, 13 bp, Artificial Sequence
  Description of Artificial Sequence: Synthetic primer
tattgaggacaga

SEQ ID NO: 3030 - DNA, 13 bp, Artificial Sequence
  Description of Artificial Sequence: Synthetic primer
caagtatttgcct

SEQ ID NO: 3031 - DNA, 13 bp, Artificial Sequence
  Description of Artificial Sequence: Synthetic primer
aacatctaattca

SEQ ID NO: 3032 - DNA, 13 bp, Artificial Sequence
  Description of Artificial Sequence: Synthetic primer
gtctgcccagcag

SEQ ID NO: 3033 - DNA, 13 bp, Artificial Sequence
  Description of Artificial Sequence: Synthetic primer
cacaacaccaccg

SEQ ID NO: 3034 - DNA, 13 bp, Artificial Sequence
  Description of Artificial Sequence: Synthetic primer
ttgagactgatta

SEQ ID NO: 3035 - DNA, 13 bp, Artificial Sequence
  Description of Artificial Sequence: Synthetic primer
tttaaaccaacag

SEQ ID NO: 3036 - DNA, 13 bp, Artificial Sequence
  Description of Artificial Sequence: Synthetic primer
agacactgacgga

SEQ ID NO: 3037 - DNA, 13 bp, Artificial Sequence
  Description of Artificial Sequence: Synthetic primer
tttctcttttggt

SEQ ID NO: 3038 - DNA, 13 bp, Artificial Sequence
  Description of Artificial Sequence: Synthetic primer
tcccaccaacgtc

SEQ ID NO: 3039 - DNA, 13 bp, Artificial Sequence
  Description of Artificial Sequence: Synthetic primer
ggggcgattaggc

SEQ ID NO: 3040 - DNA, 13 bp, Artificial Sequence
  Description of Artificial Sequence: Synthetic primer
gactctgaaggct

SEQ ID NO: 3041 - DNA, 13 bp, Artificial Sequence
  Description of Artificial Sequence: Synthetic primer
caatgactgcgtt

SEQ ID NO: 3042 - DNA, 13 bp, Artificial Sequence
  Description of Artificial Sequence: Synthetic primer
aattgagcataag

SEQ ID NO: 3043 - DNA, 13 bp, Artificial Sequence
  Description of Artificial Sequence: Synthetic primer
gcacgtcagtcac

SEQ ID NO: 3044 - DNA, 13 bp, Artificial Sequence
  Description of Artificial Sequence: Synthetic primer
catcgaaactgat

SEQ ID NO: 3045 - DNA, 13 bp, Artificial Sequence
  Description of Artificial Sequence: Synthetic primer
agctgtatgatct

SEQ ID NO: 3046 - DNA, 13 bp, Artificial Sequence
  Description of Artificial Sequence: Synthetic primer
gctgcacacatgg

SEQ ID NO: 3047 - DNA, 13 bp, Artificial Sequence
  Description of Artificial Sequence: Synthetic primer
gaagaagacctta

SEQ ID NO: 3048 - DNA, 13 bp, Artificial Sequence
  Description of Artificial Sequence: Synthetic primer
tggaaagtggaat

SEQ ID NO: 3049 - DNA, 13 bp, Artificial Sequence
  Description of Artificial Sequence: Synthetic primer
acttaaggatgaa

SEQ ID NO: 3050 - DNA, 13 bp, Artificial Sequence
  Description of Artificial Sequence: Synthetic primer
ctggttcagtttt

SEQ ID NO: 3051 - DNA, 13 bp, Artificial Sequence
  Description of Artificial Sequence: Synthetic primer
caggtgagagaaa

SEQ ID NO: 3052 - DNA, 13 bp, Artificial Sequence
  Description of Artificial Sequence: Synthetic primer
ctagtgatgaagt

SEQ ID NO: 3053 - DNA, 13 bp, Artificial Sequence
  Description of Artificial Sequence: Synthetic primer
cccaggcgatttg

SEQ ID NO: 3054 - DNA, 13 bp, Artificial Sequence
  Description of Artificial Sequence: Synthetic primer
cagtacaacccaa

SEQ ID NO: 3055 - DNA, 13 bp, Artificial Sequence
  Description of Artificial Sequence: Synthetic primer
tacttctctgcca

SEQ ID NO: 3056 - DNA, 13 bp, Artificial Sequence
  Description of Artificial Sequence: Synthetic primer
aatgcatttgaat

SEQ ID NO: 3057 - DNA, 13 bp, Artificial Sequence
  Description of Artificial Sequence: Synthetic primer
gttacccaagagc

SEQ ID NO: 3058 - DNA, 13 bp, Artificial Sequence
  Description of Artificial Sequence: Synthetic primer
attcaagtacaga

SEQ ID NO: 3059 - DNA, 13 bp, Artificial Sequence
  Description of Artificial Sequence: Synthetic primer
gaccatcaacaga

SEQ ID NO: 3060 - DNA, 13 bp, Artificial Sequence
  Description of Artificial Sequence: Synthetic primer
tcaggtgacagac

SEQ ID NO: 3061 - DNA, 13 bp, Artificial Sequence
  Description of Artificial Sequence: Synthetic primer
ttcagatggacta

SEQ ID NO: 3062 - DNA, 13 bp, Artificial Sequence
  Description of Artificial Sequence: Synthetic primer
taacctcagatgg

SEQ ID NO: 3063 - DNA, 13 bp, Artificial Sequence
  Description of Artificial Sequence: Synthetic primer
aacagtccgcaca

SEQ ID NO: 3064 - DNA, 13 bp, Artificial Sequence
  Description of Artificial Sequence: Synthetic primer
ctccacaccaaca

SEQ ID NO: 3065 - DNA, 13 bp, Artificial Sequence
  Description of Artificial Sequence: Synthetic primer
ccctcacaccgga

SEQ ID NO: 3066 - DNA, 13 bp, Artificial Sequence
  Description of Artificial Sequence: Synthetic primer
actctttagacat

SEQ ID NO: 3067 - DNA, 13 bp, Artificial Sequence
  Description of Artificial Sequence: Synthetic primer
acaacccgagccc

SEQ ID NO: 3068 - DNA, 13 bp, Artificial Sequence
  Description of Artificial Sequence: Synthetic primer
aattgagacatac

SEQ ID NO: 3069 - DNA, 13 bp, Artificial Sequence
  Description of Artificial Sequence: Synthetic primer
ccctagtgttagt

SEQ ID NO: 3070 - DNA, 13 bp, Artificial Sequence
  Description of Artificial Sequence: Synthetic primer
acgcccacagtgt

SEQ ID NO: 3071 - DNA, 13 bp, Artificial Sequence
  Description of Artificial Sequence: Synthetic primer
accaagtccattc

SEQ ID NO: 3072 - DNA, 13 bp, Artificial Sequence
  Description of Artificial Sequence: Synthetic primer
caacaggccttgc

SEQ ID NO: 3073 - DNA, 13 bp, Artificial Sequence
  Description of Artificial Sequence: Synthetic primer
tctcacagttcct

SEQ ID NO: 3074 - DNA, 13 bp, Artificial Sequence
  Description of Artificial Sequence: Synthetic primer
ctggcgaaattgt

SEQ ID NO: 3075 - DNA, 13 bp, Artificial Sequence
  Description of Artificial Sequence: Synthetic primer
atatacgagtgtg

SEQ ID NO: 3076 - DNA, 13 bp, Artificial Sequence
  Description of Artificial Sequence: Synthetic primer
acccatatatgaa

SEQ ID NO: 3077 - DNA, 13 bp, Artificial Sequence
  Description of Artificial Sequence: Synthetic primer
caaaatggaaaac

SEQ ID NO: 3078 - DNA, 13 bp, Artificial Sequence
  Description of Artificial Sequence: Synthetic primer
aaagtccctggtg

SEQ ID NO: 3079 - DNA, 13 bp, Artificial Sequence
  Description of Artificial Sequence: Synthetic primer
cgtgccgcttacg

SEQ ID NO: 3080 - DNA, 13 bp, Artificial Sequence
  Description of Artificial Sequence: Synthetic primer
gactgtctcacag

SEQ ID NO: 3081 - DNA, 13 bp, Artificial Sequence
  Description of Artificial Sequence: Synthetic primer
atcgaagtgacta

SEQ ID NO: 3082 - DNA, 13 bp, Artificial Sequence
  Description of Artificial Sequence: Synthetic primer
agatgaacaaatg

SEQ ID NO: 3083 - DNA, 13 bp, Artificial Sequence
  Description of Artificial Sequence: Synthetic primer
ccaagcttgcaga

SEQ ID NO: 3084 - DNA, 13 bp, Artificial Sequence
  Description of Artificial Sequence: Synthetic primer
acaaggctggcgt

SEQ ID NO: 3085 - DNA, 13 bp, Artificial Sequence
  Description of Artificial Sequence: Synthetic primer
tgatgatgctgct

SEQ ID NO: 3086 - DNA, 13 bp, Artificial Sequence
  Description of Artificial Sequence: Synthetic primer
ggtccttgcagaa

SEQ ID NO: 3087 - DNA, 13 bp, Artificial Sequence
  Description of Artificial Sequence: Synthetic primer
ggcatgtttccag

SEQ ID NO: 3088 - DNA, 13 bp, Artificial Sequence
  Description of Artificial Sequence: Synthetic primer
aaaagagacagtt

SEQ ID NO: 3089 - DNA, 13 bp, Artificial Sequence
  Description of Artificial Sequence: Synthetic primer
caacatcagtgtt

SEQ ID NO: 3090 - DNA, 13 bp, Artificial Sequence
  Description of Artificial Sequence: Synthetic primer
tctgctgtttctt

SEQ ID NO: 3091 - DNA, 13 bp, Artificial Sequence
  Description of Artificial Sequence: Synthetic primer
tttgctatcattt

SEQ ID NO: 3092 - DNA, 13 bp, Artificial Sequence
  Description of Artificial Sequence: Synthetic primer
gaccaacagctga

SEQ ID NO: 3093 - DNA, 13 bp, Artificial Sequence
  Description of Artificial Sequence: Synthetic primer
ttctactgaacat

SEQ ID NO: 3094 - DNA, 13 bp, Artificial Sequence
  Description of Artificial Sequence: Synthetic primer
actttgagatgac

SEQ ID NO: 3095 - DNA, 13 bp, Artificial Sequence
  Description of Artificial Sequence: Synthetic primer
aacaccaatctgg

SEQ ID NO: 3096 - DNA, 13 bp, Artificial Sequence
  Description of Artificial Sequence: Synthetic primer
taatccaccatct

SEQ ID NO: 3097 - DNA, 13 bp, Artificial Sequence
  Description of Artificial Sequence: Synthetic primer
ccacttcatcact

SEQ ID NO: 3098 - DNA, 13 bp, Artificial Sequence
  Description of Artificial Sequence: Synthetic primer
ttgccttgtctat

SEQ ID NO: 3099 - DNA, 13 bp, Artificial Sequence
  Description of Artificial Sequence: Synthetic primer
ctgccattctgct

SEQ ID NO: 3100 - DNA, 13 bp, Artificial Sequence
  Description of Artificial Sequence: Synthetic primer
ctcttgcttgagc

SEQ ID NO: 3101 - DNA, 13 bp, Artificial Sequence
  Description of Artificial Sequence: Synthetic primer
catcaatggagat

SEQ ID NO: 3102 - DNA, 13 bp, Artificial Sequence
  Description of Artificial Sequence: Synthetic primer
aacttgtcctact

SEQ ID NO: 3103 - DNA, 13 bp, Artificial Sequence
  Description of Artificial Sequence: Synthetic primer
tgtctttgaagaa

SEQ ID NO: 3104 - DNA, 13 bp, Artificial Sequence
  Description of Artificial Sequence: Synthetic primer
tgacaagctcagc

SEQ ID NO: 3105 - DNA, 13 bp, Artificial Sequence
  Description of Artificial Sequence: Synthetic primer
tgtacaccttctt

SEQ ID NO: 3106 - DNA, 13 bp, Artificial Sequence
  Description of Artificial Sequence: Synthetic primer
agatggatgtgca

SEQ ID NO: 3107 - DNA, 13 bp, Artificial Sequence
  Description of Artificial Sequence: Synthetic primer
cagctgccacttc

SEQ ID NO: 3108 - DNA, 13 bp, Artificial Sequence
  Description of Artificial Sequence: Synthetic primer
ttgactcttctct

SEQ ID NO: 3109 - DNA, 13 bp, Artificial Sequence
  Description of Artificial Sequence: Synthetic primer
gcaagtatattag

SEQ ID NO: 3110 - DNA, 13 bp, Artificial Sequence
  Description of Artificial Sequence: Synthetic primer
actgctctaactg

SEQ ID NO: 3111 - DNA, 13 bp, Artificial Sequence
  Description of Artificial Sequence: Synthetic primer
agtcctttgcgca

SEQ ID NO: 3112 - DNA, 13 bp, Artificial Sequence
  Description of Artificial Sequence: Synthetic primer
tttattaagacct

SEQ ID NO: 3113 - DNA, 13 bp, Artificial Sequence
  Description of Artificial Sequence: Synthetic primer
caatcttgcctgc

SEQ ID NO: 3114 - DNA, 13 bp, Artificial Sequence
  Description of Artificial Sequence: Synthetic primer
aaataatgaaact

SEQ ID NO: 3115 - DNA, 13 bp, Artificial Sequence
  Description of Artificial Sequence: Synthetic primer
tgctgagtagatc

SEQ ID NO: 3116 - DNA, 13 bp, Artificial Sequence
  Description of Artificial Sequence: Synthetic primer
ttacactggttga

SEQ ID NO: 3117 - DNA, 13 bp, Artificial Sequence
  Description of Artificial Sequence: Synthetic primer
acagaacactttg

SEQ ID NO: 3118 - DNA, 13 bp, Artificial Sequence
  Description of Artificial Sequence: Synthetic primer
acatgtccttgag

SEQ ID NO: 3119 - DNA, 13 bp, Artificial Sequence
  Description of Artificial Sequence: Synthetic primer
gtttgtctcgtgt

SEQ ID NO: 3120 - DNA, 13 bp, Artificial Sequence
  Description of Artificial Sequence: Synthetic primer
ttatataggttgt

SEQ ID NO: 3121 - DNA, 13 bp, Artificial Sequence
  Description of Artificial Sequence: Synthetic primer
tattggtgacaag

SEQ ID NO: 3122 - DNA, 13 bp, Artificial Sequence
  Description of Artificial Sequence: Synthetic primer
tgtaagattcttc

SEQ ID NO: 3123 - DNA, 13 bp, Artificial Sequence
  Description of Artificial Sequence: Synthetic primer
aaacagtggagca

SEQ ID NO: 3124 - DNA, 13 bp, Artificial Sequence
  Description of Artificial Sequence: Synthetic primer
caactattcctct

SEQ ID NO: 3125 - DNA, 13 bp, Artificial Sequence
  Description of Artificial Sequence: Synthetic primer
ttcgatacaaaca

SEQ ID NO: 3126 - DNA, 13 bp, Artificial Sequence
  Description of Artificial Sequence: Synthetic primer
tttgagaagtcaa

SEQ ID NO: 3127 - DNA, 13 bp, Artificial Sequence
  Description of Artificial Sequence: Synthetic primer
ctctctcctcagc

SEQ ID NO: 3128 - DNA, 13 bp, Artificial Sequence
  Description of Artificial Sequence: Synthetic primer
tcatccaagcttg

SEQ ID NO: 3129 - DNA, 13 bp, Artificial Sequence
  Description of Artificial Sequence: Synthetic primer
cctagctcattag

SEQ ID NO: 3130 - DNA, 13 bp, Artificial Sequence
  Description of Artificial Sequence: Synthetic primer
aaataatcaaact

SEQ ID NO: 3131 - DNA, 13 bp, Artificial Sequence
  Description of Artificial Sequence: Synthetic primer
atacaacataaca

SEQ ID NO: 3132 - DNA, 13 bp, Artificial Sequence
  Description of Artificial Sequence: Synthetic primer
aagcagctcaatc

SEQ ID NO: 3133 - DNA, 13 bp, Artificial Sequence
  Description of Artificial Sequence: Synthetic primer
acattgaaagaca

SEQ ID NO: 3134 - DNA, 13 bp, Artificial Sequence
  Description of Artificial Sequence: Synthetic primer
ggcatgcttccaa

SEQ ID NO: 3135 - DNA, 13 bp, Artificial Sequence
  Description of Artificial Sequence: Synthetic primer
aagcggtctttaa

SEQ ID NO: 3136 - DNA, 13 bp, Artificial Sequence
  Description of Artificial Sequence: Synthetic primer
caatcttttctga

SEQ ID NO: 3137 - DNA, 13 bp, Artificial Sequence
  Description of Artificial Sequence: Synthetic primer
aaacaatggagca

SEQ ID NO: 3138 - DNA, 13 bp, Artificial Sequence
  Description of Artificial Sequence: Synthetic primer
gcttccaggctgt

SEQ ID NO: 3139 - DNA, 13 bp, Artificial Sequence
  Description of Artificial Sequence: Synthetic primer
cttgtttcttaga

SEQ ID NO: 3140 - DNA, 13 bp, Artificial Sequence
  Description of Artificial Sequence: Synthetic primer
tcatctttttgat

SEQ ID NO: 3141 - DNA, 13 bp, Artificial Sequence
  Description of Artificial Sequence: Synthetic primer
attcttctacaac

SEQ ID NO: 3142 - DNA, 13 bp, Artificial Sequence
  Description of Artificial Sequence: Synthetic primer
gacatgtctttga

SEQ ID NO: 3143 - DNA, 13 bp, Artificial Sequence
  Description of Artificial Sequence: Synthetic primer
ggttgtgtgcata

SEQ ID NO: 3144 - DNA, 13 bp, Artificial Sequence
  Description of Artificial Sequence: Synthetic primer
tttgtttgatggc

SEQ ID NO: 3145 - DNA, 13 bp, Artificial Sequence
  Description of Artificial Sequence: Synthetic primer
ccttagtgaagct

SEQ ID NO: 3146 - DNA, 13 bp, Artificial Sequence
  Description of Artificial Sequence: Synthetic primer
catctaccgtgct

SEQ ID NO: 3147 - DNA, 13 bp, Artificial Sequence
  Description of Artificial Sequence: Synthetic primer
tttacgcattgcc

SEQ ID NO: 3148 - DNA, 13 bp, Artificial Sequence
  Description of Artificial Sequence: Synthetic primer
gaaagaagaatgg

SEQ ID NO: 3149 - DNA, 13 bp, Artificial Sequence
  Description of Artificial Sequence: Synthetic primer
ctgagcagacagt

SEQ ID NO: 3150 - DNA, 13 bp, Artificial Sequence
  Description of Artificial Sequence: Synthetic primer
actgccttgcact

SEQ ID NO: 3151 - DNA, 13 bp, Artificial Sequence
  Description of Artificial Sequence: Synthetic primer
gtgagttctttga

SEQ ID NO: 3152 - DNA, 13 bp, Artificial Sequence
  Description of Artificial Sequence: Synthetic primer
tcatcaattttat

SEQ ID NO: 3153 - DNA, 13 bp, Artificial Sequence
  Description of Artificial Sequence: Synthetic primer
acactattataca

SEQ ID NO: 3154 - DNA, 13 bp, Artificial Sequence
  Description of Artificial Sequence: Synthetic primer
ctctctcctcagt

SEQ ID NO: 3155 - DNA, 13 bp, Artificial Sequence
  Description of Artificial Sequence: Synthetic primer
tttgaaaggttct

SEQ ID NO: 3156 - DNA, 13 bp, Artificial Sequence
  Description of Artificial Sequence: Synthetic primer
agatctgcacatt

SEQ ID NO: 3157 - DNA, 13 bp, Artificial Sequence
  Description of Artificial Sequence: Synthetic primer
attcttctgcaac

SEQ ID NO: 3158 - DNA, 13 bp, Artificial Sequence
  Description of Artificial Sequence: Synthetic primer
ccataagcccttt

SEQ ID NO: 3159 - DNA, 13 bp, Artificial Sequence
  Description of Artificial Sequence: Synthetic primer
gctgccacttcct

SEQ ID NO: 3160 - DNA, 13 bp, Artificial Sequence
  Description of Artificial Sequence: Synthetic primer
gcatcataccgga

SEQ ID NO: 3161 - DNA, 13 bp, Artificial Sequence
  Description of Artificial Sequence: Synthetic primer
ccatcaaactcac

SEQ ID NO: 3162 - DNA, 13 bp, Artificial Sequence
  Description of Artificial Sequence: Synthetic primer
tgtgcctatcaag

SEQ ID NO: 3163 - DNA, 13 bp, Artificial Sequence
  Description of Artificial Sequence: Synthetic primer
taaaaccaaatct

SEQ ID NO: 3164 - DNA, 13 bp, Artificial Sequence
  Description of Artificial Sequence: Synthetic primer
ctgacaagttcag

SEQ ID NO: 3165 - DNA, 13 bp, Artificial Sequence
  Description of Artificial Sequence: Synthetic primer
tcaactattcccc

SEQ ID NO: 3166 - DNA, 13 bp, Artificial Sequence
  Description of Artificial Sequence: Synthetic primer
tatctcgtgttag

SEQ ID NO: 3167 - DNA, 13 bp, Artificial Sequence
  Description of Artificial Sequence: Synthetic primer
tatctgttaatga

SEQ ID NO: 3168 - DNA, 13 bp, Artificial Sequence
  Description of Artificial Sequence: Synthetic primer
taccttcaagagc

SEQ ID NO: 3169 - DNA, 13 bp, Artificial Sequence
  Description of Artificial Sequence: Synthetic primer
catggtataaatt

SEQ ID NO: 3170 - DNA, 13 bp, Artificial Sequence
  Description of Artificial Sequence: Synthetic primer
tttactcattcca

SEQ ID NO: 3171 - DNA, 13 bp, Artificial Sequence
  Description of Artificial Sequence: Synthetic primer
ttccattctagaa

SEQ ID NO: 3172 - DNA, 13 bp, Artificial Sequence
  Description of Artificial Sequence: Synthetic primer
tctaccaaatata

SEQ ID NO: 3173 - DNA, 13 bp, Artificial Sequence
  Description of Artificial Sequence: Synthetic primer
atttgcaatcatc

SEQ ID NO: 3174 - DNA, 13 bp, Artificial Sequence
  Description of Artificial Sequence: Synthetic primer
agatcagttgaag

SEQ ID NO: 3175 - DNA, 13 bp, Artificial Sequence
  Description of Artificial Sequence: Synthetic primer
taacattcaagga

SEQ ID NO: 3176 - DNA, 13 bp, Artificial Sequence
  Description of Artificial Sequence: Synthetic primer
atgagtcctttgc

SEQ ID NO: 3177 - DNA, 13 bp, Artificial Sequence
  Description of Artificial Sequence: Synthetic primer
cttgctcatgccg

SEQ ID NO: 3178 - DNA, 13 bp, Artificial Sequence
  Description of Artificial Sequence: Synthetic primer
tctgcttgtcccg

SEQ ID NO: 3179 - DNA, 13 bp, Artificial Sequence
  Description of Artificial Sequence: Synthetic primer
taaaacggacatg

SEQ ID NO: 3180 - DNA, 13 bp, Artificial Sequence
  Description of Artificial Sequence: Synthetic primer
tccaatgtggtca

SEQ ID NO: 3181 - DNA, 13 bp, Artificial Sequence
  Description of Artificial Sequence: Synthetic primer
tcattttcaaaga

SEQ ID NO: 3182 - DNA, 13 bp, Artificial Sequence
  Description of Artificial Sequence: Synthetic primer
agtatggtgcaaa

SEQ ID NO: 3183 - DNA, 13 bp, Artificial Sequence
  Description of Artificial Sequence: Synthetic primer
tgcagctaaaact

SEQ ID NO: 3184 - DNA, 13 bp, Artificial Sequence
  Description of Artificial Sequence: Synthetic primer
tccatcaaattca

SEQ ID NO: 3185 - DNA, 13 bp, Artificial Sequence
  Description of Artificial Sequence: Synthetic primer
cagctgagtggca

SEQ ID NO: 3186 - DNA, 13 bp, Artificial Sequence
  Description of Artificial Sequence: Synthetic primer
aggcaatggactc

SEQ ID NO: 3187 - DNA, 13 bp, Artificial Sequence
  Description of Artificial Sequence: Synthetic primer
catgactttagtc

SEQ ID NO: 3188 - DNA, 13 bp, Artificial Sequence
  Description of Artificial Sequence: Synthetic primer
tctgcaagcgtgt

SEQ ID NO: 3189 - DNA, 13 bp, Artificial Sequence
  Description of Artificial Sequence: Synthetic primer
ttttgatcttcac

SEQ ID NO: 3190 - DNA, 13 bp, Artificial Sequence
  Description of Artificial Sequence: Synthetic primer
gctctctccttaa

SEQ ID NO: 3191 - DNA, 13 bp, Artificial Sequence
  Description of Artificial Sequence: Synthetic primer
acagaacacttag

SEQ ID NO: 3192 - DNA, 13 bp, Artificial Sequence
  Description of Artificial Sequence: Synthetic primer
caccatcgccaaa

SEQ ID NO: 3193 - DNA, 13 bp, Artificial Sequence
  Description of Artificial Sequence: Synthetic primer
acctcatctagac

SEQ ID NO: 3194 - DNA, 13 bp, Artificial Sequence
  Description of Artificial Sequence: Synthetic primer
atgcagtcagcct

SEQ ID NO: 3195 - DNA, 13 bp, Artificial Sequence
  Description of Artificial Sequence: Synthetic primer
gattctgcttttg

SEQ ID NO: 3196 - DNA, 13 bp, Artificial Sequence
  Description of Artificial Sequence: Synthetic primer
ccacagtactaag

SEQ ID NO: 3197 - DNA, 13 bp, Artificial Sequence
  Description of Artificial Sequence: Synthetic primer
taatctttgaaag

SEQ ID NO: 3198 - DNA, 13 bp, Artificial Sequence
  Description of Artificial Sequence: Synthetic primer
caagagggacact

SEQ ID NO: 3199 - DNA, 13 bp, Artificial Sequence
  Description of Artificial Sequence: Synthetic primer
caactgactcaga

SEQ ID NO: 3200 - DNA, 13 bp, Artificial Sequence
  Description of Artificial Sequence: Synthetic primer
tgctgtttcatca

SEQ ID NO: 3201 - DNA, 13 bp, Artificial Sequence
  Description of Artificial Sequence: Synthetic primer
taacatattctct

SEQ ID NO: 3202 - DNA, 13 bp, Artificial Sequence
  Description of Artificial Sequence: Synthetic primer
agctgtttagtgc

SEQ ID NO: 3203 - DNA, 13 bp, Artificial Sequence
  Description of Artificial Sequence: Synthetic primer
ctaaccgcttccc

SEQ ID NO: 3204 - DNA, 13 bp, Artificial Sequence
  Description of Artificial Sequence: Synthetic primer
taatccaccacct

SEQ ID NO: 3205 - DNA, 13 bp, Artificial Sequence
  Description of Artificial Sequence: Synthetic primer
aaaatcaaccttg

SEQ ID NO: 3206 - DNA, 13 bp, Artificial Sequence
  Description of Artificial Sequence: Synthetic primer
atttgtttgtctc

SEQ ID NO: 3207 - DNA, 13 bp, Artificial Sequence
  Description of Artificial Sequence: Synthetic primer
tcacagacatgtg

SEQ ID NO: 3208 - DNA, 13 bp, Artificial Sequence
  Description of Artificial Sequence: Synthetic primer
attgctccccatg

SEQ ID NO: 3209 - DNA, 13 bp, Artificial Sequence
  Description of Artificial Sequence: Synthetic primer
tttccatctctac

SEQ ID NO: 3210 - DNA, 13 bp, Artificial Sequence
  Description of Artificial Sequence: Synthetic primer
ggtgctgattgaa

SEQ ID NO: 3211 - DNA, 13 bp, Artificial Sequence
  Description of Artificial Sequence: Synthetic primer
atttcagcatcta

SEQ ID NO: 3212 - DNA, 13 bp, Artificial Sequence
  Description of Artificial Sequence: Synthetic primer
ctattgaaaggaa

SEQ ID NO: 3213 - DNA, 13 bp, Artificial Sequence
  Description of Artificial Sequence: Synthetic primer
gctcaagttttgt

SEQ ID NO: 3214 - DNA, 13 bp, Artificial Sequence
  Description of Artificial Sequence: Synthetic primer
gtgacaaatccat

SEQ ID NO: 3215 - DNA, 13 bp, Artificial Sequence
  Description of Artificial Sequence: Synthetic primer
taaaaaggtcttt

SEQ ID NO: 3216 - DNA, 13 bp, Artificial Sequence
  Description of Artificial Sequence: Synthetic primer
agatgccagagct

SEQ ID NO: 3217 - DNA, 13 bp, Artificial Sequence
  Description of Artificial Sequence: Synthetic primer
ctacagtagcatt

SEQ ID NO: 3218 - DNA, 13 bp, Artificial Sequence
  Description of Artificial Sequence: Synthetic primer
cttgcctgcactt

SEQ ID NO: 3219 - DNA, 13 bp, Artificial Sequence
  Description of Artificial Sequence: Synthetic primer
gcagaagcttcag

SEQ ID NO: 3220 - DNA, 13 bp, Artificial Sequence
  Description of Artificial Sequence: Synthetic primer
tcagtggagacct

SEQ ID NO: 3221 - DNA, 13 bp, Artificial Sequence
  Description of Artificial Sequence: Synthetic primer
ttttgcacatgca

SEQ ID NO: 3222 - DNA, 13 bp, Artificial Sequence
  Description of Artificial Sequence: Synthetic primer
tcctagagcctgt

SEQ ID NO: 3223 - DNA, 13 bp, Artificial Sequence
  Description of Artificial Sequence: Synthetic primer
tgcaagaaggcca

SEQ ID NO: 3224 - DNA, 13 bp, Artificial Sequence
  Description of Artificial Sequence: Synthetic primer
caaacataaagaa

SEQ ID NO: 3225 - DNA, 13 bp, Artificial Sequence
  Description of Artificial Sequence: Synthetic primer
tttgtacatgcat

SEQ ID NO: 3226 - DNA, 13 bp, Artificial Sequence
  Description of Artificial Sequence: Synthetic primer
ttctgttgagtta

SEQ ID NO: 3227 - DNA, 13 bp, Artificial Sequence
  Description of Artificial Sequence: Synthetic primer
tgtaaatggccat

SEQ ID NO: 3228 - DNA, 13 bp, Artificial Sequence
  Description of Artificial Sequence: Synthetic primer
ttgtctgtgcttg

SEQ ID NO: 3229 - DNA, 13 bp, Artificial Sequence
  Description of Artificial Sequence: Synthetic primer
taagcagagctaa

SEQ ID NO: 3230 - DNA, 13 bp, Artificial Sequence
  Description of Artificial Sequence: Synthetic primer
atcacttgcactt

SEQ ID NO: 3231 - DNA, 13 bp, Artificial Sequence
  Description of Artificial Sequence: Synthetic primer
aacacttaaagca

SEQ ID NO: 3232 - DNA, 13 bp, Artificial Sequence
  Description of Artificial Sequence: Synthetic primer
tctttcacatcta

SEQ ID NO: 3233 - DNA, 13 bp, Artificial Sequence
  Description of Artificial Sequence: Synthetic primer
agtacatctgaga

SEQ ID NO: 3234 - DNA, 13 bp, Artificial Sequence
  Description of Artificial Sequence: Synthetic primer
caacctgtgcaag

SEQ ID NO: 3235 - DNA, 13 bp, Artificial Sequence
  Description of Artificial Sequence: Synthetic primer
tgtctatttcaca

SEQ ID NO: 3236 - DNA, 13 bp, Artificial Sequence
  Description of Artificial Sequence: Synthetic primer
gatctagccaatg

SEQ ID NO: 3237 - DNA, 13 bp, Artificial Sequence
  Description of Artificial Sequence: Synthetic primer
ataagggcatata

SEQ ID NO: 3238 - DNA, 13 bp, Artificial Sequence
  Description of Artificial Sequence: Synthetic primer
gcaatcttctaga

SEQ ID NO: 3239 - DNA, 13 bp, Artificial Sequence
  Description of Artificial Sequence: Synthetic primer
tctaaggtgagat

SEQ ID NO: 3240 - DNA, 13 bp, Artificial Sequence
  Description of Artificial Sequence: Synthetic primer
cattttacctaat

SEQ ID NO: 3241 - DNA, 13 bp, Artificial Sequence
  Description of Artificial Sequence: Synthetic primer
tgttaacacattt

SEQ ID NO: 3242 - DNA, 13 bp, Artificial Sequence
  Description of Artificial Sequence: Synthetic primer
tcctgcagatata

SEQ ID NO: 3243 - DNA, 13 bp, Artificial Sequence
  Description of Artificial Sequence: Synthetic primer
agaaccagttgat

SEQ ID NO: 3244 - DNA, 13 bp, Artificial Sequence
  Description of Artificial Sequence: Synthetic primer
gtacaagaaggcc

SEQ ID NO: 3245 - DNA, 13 bp, Artificial Sequence
  Description of Artificial Sequence: Synthetic primer
tgcaggaaggcca

SEQ ID NO: 3246 - DNA, 13 bp, Artificial Sequence
  Description of Artificial Sequence: Synthetic primer
ccatgacagaaac

SEQ ID NO: 3247 - DNA, 13 bp, Artificial Sequence
  Description of Artificial Sequence: Synthetic primer
taagggcaacaaa

SEQ ID NO: 3248 - DNA, 13 bp, Artificial Sequence
  Description of Artificial Sequence: Synthetic primer
tgcctcaattgat

SEQ ID NO: 3249 - DNA, 13 bp, Artificial Sequence
  Description of Artificial Sequence: Synthetic primer
ctccagtatatgt

SEQ ID NO: 3250 - DNA, 13 bp, Artificial Sequence
  Description of Artificial Sequence: Synthetic primer
gatctgaaaggca

SEQ ID NO: 3251 - DNA, 13 bp, Artificial Sequence
  Description of Artificial Sequence: Synthetic primer
cagtaaggacaac

SEQ ID NO: 3252 - DNA, 13 bp, Artificial Sequence
  Description of Artificial Sequence: Synthetic primer
gcctgagcacctt

SEQ ID NO: 3253 - DNA, 13 bp, Artificial Sequence
  Description of Artificial Sequence: Synthetic primer
aggggttggtggt

SEQ ID NO: 3254 - DNA, 13 bp, Artificial Sequence
  Description of Artificial Sequence: Synthetic primer
tccgtgaaaaggt

SEQ ID NO: 3255 - DNA, 13 bp, Artificial Sequence
  Description of Artificial Sequence: Synthetic primer
taaatagagcaaa

SEQ ID NO: 3256 - DNA, 13 bp, Artificial Sequence
  Description of Artificial Sequence: Synthetic primer
tcagacttgcaaa

SEQ ID NO: 3257 - DNA, 13 bp, Artificial Sequence
  Description of Artificial Sequence: Synthetic primer
tgcttgtggcggt

SEQ ID NO: 3258 - DNA, 13 bp, Artificial Sequence
  Description of Artificial Sequence: Synthetic primer
agatgtagcatat

SEQ ID NO: 3259 - DNA, 13 bp, Artificial Sequence
  Description of Artificial Sequence: Synthetic primer
tgtcgacagcaga

SEQ ID NO: 3260 - DNA, 13 bp, Artificial Sequence
  Description of Artificial Sequence: Synthetic primer
tggaacattttta

SEQ ID NO: 3261 - DNA, 13 bp, Artificial Sequence
  Description of Artificial Sequence: Synthetic primer
tcttgagcccatg

SEQ ID NO: 3262 - DNA, 13 bp, Artificial Sequence
  Description of Artificial Sequence: Synthetic primer
tggcagctggtct

SEQ ID NO: 3263 - DNA, 13 bp, Artificial Sequence
  Description of Artificial Sequence: Synthetic primer
ttgattgcaacat

SEQ ID NO: 3264 - DNA, 13 bp, Artificial Sequence
  Description of Artificial Sequence: Synthetic primer
aagctacaatagc

SEQ ID NO: 3265 - DNA, 13 bp, Artificial Sequence
  Description of Artificial Sequence: Synthetic primer
tctgagtgtcatc

SEQ ID NO: 3266 - DNA, 13 bp, Artificial Sequence
  Description of Artificial Sequence: Synthetic primer
aacagaagcctcc

SEQ ID NO: 3267 - DNA, 13 bp, Artificial Sequence
  Description of Artificial Sequence: Synthetic primer
atgaaactactag

SEQ ID NO: 3268 - DNA, 13 bp, Artificial Sequence
  Description of Artificial Sequence: Synthetic primer
actatcgatctca

SEQ ID NO: 3269 - DNA, 13 bp, Artificial Sequence
  Description of Artificial Sequence: Synthetic primer
cgtgttgttctca

SEQ ID NO: 3270 - DNA, 13 bp, Artificial Sequence
  Description of Artificial Sequence: Synthetic primer
ccggtgacaatga

SEQ ID NO: 3271 - DNA, 13 bp, Artificial Sequence
  Description of Artificial Sequence: Synthetic primer
caatattttgctg

SEQ ID NO: 3272 - DNA, 13 bp, Artificial Sequence
  Description of Artificial Sequence: Synthetic primer
ttcagctgttggt

SEQ ID NO: 3273 - DNA, 13 bp, Artificial Sequence
  Description of Artificial Sequence: Synthetic primer
tagccattttgcc

SEQ ID NO: 3274 - DNA, 13 bp, Artificial Sequence
  Description of Artificial Sequence: Synthetic primer
gatttaaagggtt

SEQ ID NO: 3275 - DNA, 13 bp, Artificial Sequence
  Description of Artificial Sequence: Synthetic primer
gcttgtgcttgat

SEQ ID NO: 3276 - DNA, 13 bp, Artificial Sequence
  Description of Artificial Sequence: Synthetic primer
tccatccaaacat

SEQ ID NO: 3277 - DNA, 13 bp, Artificial Sequence
  Description of Artificial Sequence: Synthetic primer
gtatcttaccgta

SEQ ID NO: 3278 - DNA, 13 bp, Artificial Sequence
  Description of Artificial Sequence: Synthetic primer
atatgcagttccc

SEQ ID NO: 3279 - DNA, 13 bp, Artificial Sequence
  Description of Artificial Sequence: Synthetic primer
gttgtaactgcaa

SEQ ID NO: 3280 - DNA, 13 bp, Artificial Sequence
  Description of Artificial Sequence: Synthetic primer
cacagccctttaa

SEQ ID NO: 3281 - DNA, 13 bp, Artificial Sequence
  Description of Artificial Sequence: Synthetic primer
aagcagacaccca

SEQ ID NO: 3282 - DNA, 13 bp, Artificial Sequence
  Description of Artificial Sequence: Synthetic primer
caagtgctattcc

SEQ ID NO: 3283 - DNA, 13 bp, Artificial Sequence
  Description of Artificial Sequence: Synthetic primer
caatctgtgcacc

SEQ ID NO: 3284 - DNA, 13 bp, Artificial Sequence
  Description of Artificial Sequence: Synthetic primer
tttgcattgacac

SEQ ID NO: 3285 - DNA, 13 bp, Artificial Sequence
  Description of Artificial Sequence: Synthetic primer
tgttggcactggt

SEQ ID NO: 3286 - DNA, 13 bp, Artificial Sequence
  Description of Artificial Sequence: Synthetic primer
cttgtagcgttgc

SEQ ID NO: 3287 - DNA, 13 bp, Artificial Sequence
  Description of Artificial Sequence: Synthetic primer
ctatgtcctttct

SEQ ID NO: 3288 - DNA, 13 bp, Artificial Sequence
  Description of Artificial Sequence: Synthetic primer
cgcgcagcccttt

SEQ ID NO: 3289 - DNA, 13 bp, Artificial Sequence
  Description of Artificial Sequence: Synthetic primer
ttgacacggaaac

SEQ ID NO: 3290 - DNA, 13 bp, Artificial Sequence
  Description of Artificial Sequence: Synthetic primer
atgttagcactgg

SEQ ID NO: 3291 - DNA, 13 bp, Artificial Sequence
  Description of Artificial Sequence: Synthetic primer
gtcaatctgagca

SEQ ID NO: 3292 - DNA, 13 bp, Artificial Sequence
  Description of Artificial Sequence: Synthetic primer
acaagcgctatcc

SEQ ID NO: 3293 - DNA, 13 bp, Artificial Sequence
  Description of Artificial Sequence: Synthetic primer
tctgcaaatcgag

SEQ ID NO: 3294 - DNA, 13 bp, Artificial Sequence
  Description of Artificial Sequence: Synthetic primer
agaaccggactcc

SEQ ID NO: 3295 - DNA, 13 bp, Artificial Sequence
  Description of Artificial Sequence: Synthetic primer
atgatgaacagga

SEQ ID NO: 3296 - DNA, 13 bp, Artificial Sequence
  Description of Artificial Sequence: Synthetic primer
ttggtgagcatga

SEQ ID NO: 3297 - DNA, 13 bp, Artificial Sequence
  Description of Artificial Sequence: Synthetic primer
ttcattgaggggg

SEQ ID NO: 3298 - DNA, 13 bp, Artificial Sequence
  Description of Artificial Sequence: Synthetic primer
acatctgaggacc

SEQ ID NO: 3299 - DNA, 13 bp, Artificial Sequence
  Description of Artificial Sequence: Synthetic primer
tgctcatcggctt

SEQ ID NO: 3300 - DNA, 13 bp, Artificial Sequence
  Description of Artificial Sequence: Synthetic primer
ggaatggacccat

SEQ ID NO: 3301 - DNA, 13 bp, Artificial Sequence
  Description of Artificial Sequence: Synthetic primer
atgacaatgacaa

SEQ ID NO: 3302 - DNA, 13 bp, Artificial Sequence
  Description of Artificial Sequence: Synthetic primer
gatggtggttgtg

SEQ ID NO: 3303 - DNA, 13 bp, Artificial Sequence
  Description of Artificial Sequence: Synthetic primer
cgcagcagtcaaa

SEQ ID NO: 3304 - DNA, 13 bp, Artificial Sequence
  Description of Artificial Sequence: Synthetic primer
aggaagatcatga

SEQ ID NO: 3305 - DNA, 13 bp, Artificial Sequence
  Description of Artificial Sequence: Synthetic primer
aagacccggcaag

SEQ ID NO: 3306 - DNA, 13 bp, Artificial Sequence
  Description of Artificial Sequence: Synthetic primer
aacatgatgggga

SEQ ID NO: 3307 - DNA, 13 bp, Artificial Sequence
  Description of Artificial Sequence: Synthetic primer
tctgaaatgaagg

SEQ ID NO: 3308 - DNA, 13 bp, Artificial Sequence
  Description of Artificial Sequence: Synthetic primer
gggaaggtggaca

SEQ ID NO: 3309 - DNA, 13 bp, Artificial Sequence
  Description of Artificial Sequence: Synthetic primer
gatagaggctggg

SEQ ID NO: 3310 - DNA, 13 bp, Artificial Sequence
  Description of Artificial Sequence: Synthetic primer
actctgaggaagg

SEQ ID NO: 3311 - DNA, 13 bp, Artificial Sequence
  Description of Artificial Sequence: Synthetic primer
aagcttgcccagg

SEQ ID NO: 3312 - DNA, 13 bp, Artificial Sequence
  Description of Artificial Sequence: Synthetic primer
gggagaatgtgcc

SEQ ID NO: 3313 - DNA, 13 bp, Artificial Sequence
  Description of Artificial Sequence: Synthetic primer
ttggctctgcctt

SEQ ID NO: 3314 - DNA, 13 bp, Artificial Sequence
  Description of Artificial Sequence: Synthetic primer
acaatcttgatga

SEQ ID NO: 3315 - DNA, 13 bp, Artificial Sequence
  Description of Artificial Sequence: Synthetic primer
aagagtgcccatg

SEQ ID NO: 3316 - DNA, 13 bp, Artificial Sequence
  Description of Artificial Sequence: Synthetic primer
gcagagatggtga

SEQ ID NO: 3317 - DNA, 13 bp, Artificial Sequence
  Description of Artificial Sequence: Synthetic primer
gagactctgatga

SEQ ID NO: 3318 - DNA, 13 bp, Artificial Sequence
  Description of Artificial Sequence: Synthetic primer
aagcagaagaaac

SEQ ID NO: 3319 - DNA, 13 bp, Artificial Sequence
  Description of Artificial Sequence: Synthetic primer
cattttccagaat

SEQ ID NO: 3320 - DNA, 13 bp, Artificial Sequence
  Description of Artificial Sequence: Synthetic primer
atcaggaaccctc

SEQ ID NO: 3321 - DNA, 13 bp, Artificial Sequence
  Description of Artificial Sequence: Synthetic primer
tgcagttggagga

SEQ ID NO: 3322 - DNA, 13 bp, Artificial Sequence
  Description of Artificial Sequence: Synthetic primer
gagaggtgattgg

SEQ ID NO: 3323 - DNA, 13 bp, Artificial Sequence
  Description of Artificial Sequence: Synthetic primer
atggtcgattcat

SEQ ID NO: 3324 - DNA, 13 bp, Artificial Sequence
  Description of Artificial Sequence: Synthetic primer
gctctctccaatg

SEQ ID NO: 3325 - DNA, 13 bp, Artificial Sequence
  Description of Artificial Sequence: Synthetic primer
tggtgttttgaag

SEQ ID NO: 3326 - DNA, 13 bp, Artificial Sequence
  Description of Artificial Sequence: Synthetic primer
aatgccaggtgca

SEQ ID NO: 3327 - DNA, 13 bp, Artificial Sequence
  Description of Artificial Sequence: Synthetic primer
tggacaggagaaa

SEQ ID NO: 3328 - DNA, 13 bp, Artificial Sequence
  Description of Artificial Sequence: Synthetic primer
atccatttgctct

SEQ ID NO: 3329 - DNA, 13 bp, Artificial Sequence
  Description of Artificial Sequence: Synthetic primer
ataatgcccacca

SEQ ID NO: 3330 - DNA, 13 bp, Artificial Sequence
  Description of Artificial Sequence: Synthetic primer
tgattccatcttg

SEQ ID NO: 3331 - DNA, 13 bp, Artificial Sequence
  Description of Artificial Sequence: Synthetic primer
gcaatcaataaag

SEQ ID NO: 3332 - DNA, 13 bp, Artificial Sequence
  Description of Artificial Sequence: Synthetic primer
taggggtccttca

SEQ ID NO: 3333 - DNA, 13 bp, Artificial Sequence
  Description of Artificial Sequence: Synthetic primer
accttcaaggaca

SEQ ID NO: 3334 - DNA, 13 bp, Artificial Sequence
  Description of Artificial Sequence: Synthetic primer
atgacaacaacct

SEQ ID NO: 3335 - DNA, 13 bp, Artificial Sequence
  Description of Artificial Sequence: Synthetic primer
ggcaatggaattc

SEQ ID NO: 3336 - DNA, 13 bp, Artificial Sequence
  Description of Artificial Sequence: Synthetic primer
agtggtgctttga

SEQ ID NO: 3337 - DNA, 13 bp, Artificial Sequence
  Description of Artificial Sequence: Synthetic primer
ggtctgttcatgg

SEQ ID NO: 3338 - DNA, 13 bp, Artificial Sequence
  Description of Artificial Sequence: Synthetic primer
ggactgtctatgt

SEQ ID NO: 3339 - DNA, 13 bp, Artificial Sequence
  Description of Artificial Sequence: Synthetic primer
acaagtgaagaca

SEQ ID NO: 3340 - DNA, 13 bp, Artificial Sequence
  Description of Artificial Sequence: Synthetic primer
cagtgaatggaaa

SEQ ID NO: 3341 - DNA, 13 bp, Artificial Sequence
  Description of Artificial Sequence: Synthetic primer
aacatgatgggaa

SEQ ID NO: 3342 - DNA, 13 bp, Artificial Sequence
  Description of Artificial Sequence: Synthetic primer
catcctgggcctc

SEQ ID NO: 3343 - DNA, 13 bp, Artificial Sequence
  Description of Artificial Sequence: Synthetic primer
gatgactggctga

SEQ ID NO: 3344 - DNA, 13 bp, Artificial Sequence
  Description of Artificial Sequence: Synthetic primer
caccgcatccgga

SEQ ID NO: 3345 - DNA, 13 bp, Artificial Sequence
  Description of Artificial Sequence: Synthetic primer
gaacatcatcact

SEQ ID NO: 3346 - DNA, 13 bp, Artificial Sequence
  Description of Artificial Sequence: Synthetic primer
actgtggttatca

SEQ ID NO: 3347 - DNA, 13 bp, Artificial Sequence
  Description of Artificial Sequence: Synthetic primer
accgcagtggact

SEQ ID NO: 3348 - DNA, 13 bp, Artificial Sequence
  Description of Artificial Sequence: Synthetic primer
tcaatccaatagc

SEQ ID NO: 3349 - DNA, 13 bp, Artificial Sequence
  Description of Artificial Sequence: Synthetic primer
tcttgctggctgg

SEQ ID NO: 3350 - DNA, 13 bp, Artificial Sequence
  Description of Artificial Sequence: Synthetic primer
ggaatcctgatga

SEQ ID NO: 3351 - DNA, 13 bp, Artificial Sequence
  Description of Artificial Sequence: Synthetic primer
ctggtgcaatgcg

SEQ ID NO: 3352 - DNA, 13 bp, Artificial Sequence
  Description of Artificial Sequence: Synthetic primer
cctttctgctctc

SEQ ID NO: 3353 - DNA, 13 bp, Artificial Sequence
  Description of Artificial Sequence: Synthetic primer
acccttacaggac

SEQ ID NO: 3354 - DNA, 13 bp, Artificial Sequence
  Description of Artificial Sequence: Synthetic primer
aggaaaatcatga

SEQ ID NO: 3355 - DNA, 13 bp, Artificial Sequence
  Description of Artificial Sequence: Synthetic primer
tacccacacatga

SEQ ID NO: 3356 - DNA, 13 bp, Artificial Sequence
  Description of Artificial Sequence: Synthetic primer
atcaggaatcctc

SEQ ID NO: 3357 - DNA, 13 bp, Artificial Sequence
  Description of Artificial Sequence: Synthetic primer
tgtggcctgtttg

SEQ ID NO: 3358 - DNA, 13 bp, Artificial Sequence
  Description of Artificial Sequence: Synthetic primer
tgaaagtgcaaca

SEQ ID NO: 3359 - DNA, 13 bp, Artificial Sequence
  Description of Artificial Sequence: Synthetic primer
catggatgcaagt

SEQ ID NO: 3360 - DNA, 13 bp, Artificial Sequence
  Description of Artificial Sequence: Synthetic primer
gtcaggtccagac

SEQ ID NO: 3361 - DNA, 13 bp, Artificial Sequence
  Description of Artificial Sequence: Synthetic primer
atggctgaagctg

SEQ ID NO: 3362 - DNA, 13 bp, Artificial Sequence
  Description of Artificial Sequence: Synthetic primer
atggcagaagcag

SEQ ID NO: 3363 - DNA, 13 bp, Artificial Sequence
  Description of Artificial Sequence: Synthetic primer
tggtcactgtcaa

SEQ ID NO: 3364 - DNA, 13 bp, Artificial Sequence
  Description of Artificial Sequence: Synthetic primer
ccaccgcctggaa

SEQ ID NO: 3365 - DNA, 13 bp, Artificial Sequence
  Description of Artificial Sequence: Synthetic primer
tccatgggggcac

SEQ ID NO: 3366 - DNA, 13 bp, Artificial Sequence
  Description of Artificial Sequence: Synthetic primer
cagatggttgctc

SEQ ID NO: 3367 - DNA, 13 bp, Artificial Sequence
  Description of Artificial Sequence: Synthetic primer
aatgacaacaact

SEQ ID NO: 3368 - DNA, 13 bp, Artificial Sequence
  Description of Artificial Sequence: Synthetic primer
cagtatggatgga

SEQ ID NO: 3369 - DNA, 13 bp, Artificial Sequence
  Description of Artificial Sequence: Synthetic primer
tttgtcctcatgg

SEQ ID NO: 3370 - DNA, 13 bp, Artificial Sequence
  Description of Artificial Sequence: Synthetic primer
atacatccatttg

SEQ ID NO: 3371 - DNA, 13 bp, Artificial Sequence
  Description of Artificial Sequence: Synthetic primer
cttggatgcaggt

SEQ ID NO: 3372 - DNA, 13 bp, Artificial Sequence
  Description of Artificial Sequence: Synthetic primer
aagtggacaccgg

SEQ ID NO: 3373 - DNA, 13 bp, Artificial Sequence
  Description of Artificial Sequence: Synthetic primer
ctggtgagcatga

SEQ ID NO: 3374 - DNA, 13 bp, Artificial Sequence
  Description of Artificial Sequence: Synthetic primer
atcagtgtgttcc

SEQ ID NO: 3375 - DNA, 13 bp, Artificial Sequence
  Description of Artificial Sequence: Synthetic primer
cccagaaacccgc

SEQ ID NO: 3376 - DNA, 13 bp, Artificial Sequence
  Description of Artificial Sequence: Synthetic primer
tcaggaatcccct

SEQ ID NO: 3377 - DNA, 13 bp, Artificial Sequence
  Description of Artificial Sequence: Synthetic primer
cagcaatcaaagc

SEQ ID NO: 3378 - DNA, 13 bp, Artificial Sequence
  Description of Artificial Sequence: Synthetic primer
gtgggaaaaggaa

SEQ ID NO: 3379 - DNA, 13 bp, Artificial Sequence
  Description of Artificial Sequence: Synthetic primer
actactcagaacc

SEQ ID NO: 3380 - DNA, 13 bp, Artificial Sequence
  Description of Artificial Sequence: Synthetic primer
gaaaggtggacac

SEQ ID NO: 3381 - DNA, 13 bp, Artificial Sequence
  Description of Artificial Sequence: Synthetic primer
tgtcagagatgaa

SEQ ID NO: 3382 - DNA, 13 bp, Artificial Sequence
  Description of Artificial Sequence: Synthetic primer
tgctgttctgcac

SEQ ID NO: 3383 - DNA, 13 bp, Artificial Sequence
  Description of Artificial Sequence: Synthetic primer
gatgacgagcaag

SEQ ID NO: 3384 - DNA, 13 bp, Artificial Sequence
  Description of Artificial Sequence: Synthetic primer
gaggaatggaaag

SEQ ID NO: 3385 - DNA, 13 bp, Artificial Sequence
  Description of Artificial Sequence: Synthetic primer
tgttttgagggtc

SEQ ID NO: 3386 - DNA, 13 bp, Artificial Sequence
  Description of Artificial Sequence: Synthetic primer
caatggctgtggt

SEQ ID NO: 3387 - DNA, 13 bp, Artificial Sequence
  Description of Artificial Sequence: Synthetic primer
gacgatgttgtct

SEQ ID NO: 3388 - DNA, 13 bp, Artificial Sequence
  Description of Artificial Sequence: Synthetic primer
aagttcacagact

SEQ ID NO: 3389 - DNA, 13 bp, Artificial Sequence
  Description of Artificial Sequence: Synthetic primer
ggaatattgtgac

SEQ ID NO: 3390 - DNA, 13 bp, Artificial Sequence
  Description of Artificial Sequence: Synthetic primer
acactagtctgtt

SEQ ID NO: 3391 - DNA, 13 bp, Artificial Sequence
  Description of Artificial Sequence: Synthetic primer
gcctgctcatggg

SEQ ID NO: 3392 - DNA, 13 bp, Artificial Sequence
  Description of Artificial Sequence: Synthetic primer
gagcaaatgagag

SEQ ID NO: 3393 - DNA, 13 bp, Artificial Sequence
  Description of Artificial Sequence: Synthetic primer
actagggttgttc

SEQ ID NO: 3394 - DNA, 13 bp, Artificial Sequence
  Description of Artificial Sequence: Synthetic primer
ttcttgcactctg

SEQ ID NO: 3395 - DNA, 13 bp, Artificial Sequence
  Description of Artificial Sequence: Synthetic primer
gggggatcctcat

SEQ ID NO: 3396 - DNA, 13 bp, Artificial Sequence
  Description of Artificial Sequence: Synthetic primer
cgtggtctgtcca

SEQ ID NO: 3397 - DNA, 13 bp, Artificial Sequence
  Description of Artificial Sequence: Synthetic primer
tttggttctgcct

SEQ ID NO: 3398 - DNA, 13 bp, Artificial Sequence
  Description of Artificial Sequence: Synthetic primer
gggaaaggaattc

SEQ ID NO: 3399 - DNA, 13 bp, Artificial Sequence
  Description of Artificial Sequence: Synthetic primer
tagagggaaacac

SEQ ID NO: 3400 - DNA, 13 bp, Artificial Sequence
  Description of Artificial Sequence: Synthetic primer
ggtgcaatgaggg

SEQ ID NO: 3401 - DNA, 13 bp, Artificial Sequence
  Description of Artificial Sequence: Synthetic primer
atggtctgcagta

SEQ ID NO: 3402 - DNA, 13 bp, Artificial Sequence
  Description of Artificial Sequence: Synthetic primer
ggacacatccgtt

SEQ ID NO: 3403 - DNA, 13 bp, Artificial Sequence
  Description of Artificial Sequence: Synthetic primer
tgggaagaagagc

SEQ ID NO: 3404 - DNA, 13 bp, Artificial Sequence
  Description of Artificial Sequence: Synthetic primer
gtgaagtggtggg

SEQ ID NO: 3405 - DNA, 13 bp, Artificial Sequence
  Description of Artificial Sequence: Synthetic primer
cttcttgttcaac

SEQ ID NO: 3406 - DNA, 13 bp, Artificial Sequence
  Description of Artificial Sequence: Synthetic primer
aatggcaagaagc

SEQ ID NO: 3407 - DNA, 13 bp, Artificial Sequence
  Description of Artificial Sequence: Synthetic primer
gaaatgaaggaag

SEQ ID NO: 3408 - DNA, 13 bp, Artificial Sequence
  Description of Artificial Sequence: Synthetic primer
aatcggccaagaa

SEQ ID NO: 3409 - DNA, 13 bp, Artificial Sequence
  Description of Artificial Sequence: Synthetic primer
cagctgaggactt

SEQ ID NO: 3410 - DNA, 13 bp, Artificial Sequence
  Description of Artificial Sequence: Synthetic primer
atttccatgaact

SEQ ID NO: 3411 - DNA, 13 bp, Artificial Sequence
  Description of Artificial Sequence: Synthetic primer
ttggactgcgcac

SEQ ID NO: 3412 - DNA, 13 bp, Artificial Sequence
  Description of Artificial Sequence: Synthetic primer
cggactgaaaact

SEQ ID NO: 3413 - DNA, 13 bp, Artificial Sequence
  Description of Artificial Sequence: Synthetic primer
cattctgaggagg

SEQ ID NO: 3414 - DNA, 13 bp, Artificial Sequence
  Description of Artificial Sequence: Synthetic primer
tcttcctggaatc

SEQ ID NO: 3415 - DNA, 13 bp, Artificial Sequence
  Description of Artificial Sequence: Synthetic primer
gagactcagatga

SEQ ID NO: 3416 - DNA, 13 bp, Artificial Sequence
  Description of Artificial Sequence: Synthetic primer
ccctttccagaaa

SEQ ID NO: 3417 - DNA, 13 bp, Artificial Sequence
  Description of Artificial Sequence: Synthetic primer
gacatggaaaatt

SEQ ID NO: 3418 - DNA, 13 bp, Artificial Sequence
  Description of Artificial Sequence: Synthetic primer
tcctacatcatgc

SEQ ID NO: 3419 - DNA, 13 bp, Artificial Sequence
  Description of Artificial Sequence: Synthetic primer
ttgcaacgatgct

SEQ ID NO: 3420 - DNA, 13 bp, Artificial Sequence
  Description of Artificial Sequence: Synthetic primer
gagggtctcctct

SEQ ID NO: 3421 - DNA, 13 bp, Artificial Sequence
  Description of Artificial Sequence: Synthetic primer
caaaggtctgctt

SEQ ID NO: 3422 - DNA, 13 bp, Artificial Sequence
  Description of Artificial Sequence: Synthetic primer
ttttatcccggtt

SEQ ID NO: 3423 - DNA, 13 bp, Artificial Sequence
  Description of Artificial Sequence: Synthetic primer
gctgccattcaga

SEQ ID NO: 3424 - DNA, 13 bp, Artificial Sequence
  Description of Artificial Sequence: Synthetic primer
tgtattcaaagac

SEQ ID NO: 3425 - DNA, 13 bp, Artificial Sequence
  Description of Artificial Sequence: Synthetic primer
ctggtggatcctt

SEQ ID NO: 3426 - DNA, 13 bp, Artificial Sequence
  Description of Artificial Sequence: Synthetic primer
ccaccacactctt

SEQ ID NO: 3427 - DNA, 13 bp, Artificial Sequence
  Description of Artificial Sequence: Synthetic primer
acatctggcatgt

SEQ ID NO: 3428 - DNA, 13 bp, Artificial Sequence
  Description of Artificial Sequence: Synthetic primer
ctttgcacattca

SEQ ID NO: 3429 - DNA, 13 bp, Artificial Sequence
  Description of Artificial Sequence: Synthetic primer
caatgcgccccct

SEQ ID NO: 3430 - DNA, 13 bp, Artificial Sequence
  Description of Artificial Sequence: Synthetic primer
acaatgccttcag

SEQ ID NO: 3431 - DNA, 13 bp, Artificial Sequence
  Description of Artificial Sequence: Synthetic primer
gtgacatgccaca

SEQ ID NO: 3432 - DNA, 13 bp, Artificial Sequence
  Description of Artificial Sequence: Synthetic primer
ctcttgccaaagt

SEQ ID NO: 3433 - DNA, 13 bp, Artificial Sequence
  Description of Artificial Sequence: Synthetic primer
tcatcacaacctg

SEQ ID NO: 3434 - DNA, 13 bp, Artificial Sequence
  Description of Artificial Sequence: Synthetic primer
tacacacaagtcc

SEQ ID NO: 3435 - DNA, 13 bp, Artificial Sequence
  Description of Artificial Sequence: Synthetic primer
gcatcaaacttga

SEQ ID NO: 3436 - DNA, 13 bp, Artificial Sequence
  Description of Artificial Sequence: Synthetic primer
gtcaacagagcca

SEQ ID NO: 3437 - DNA, 13 bp, Artificial Sequence
  Description of Artificial Sequence: Synthetic primer
agaatccaccacc

SEQ ID NO: 3438 - DNA, 13 bp, Artificial Sequence
  Description of Artificial Sequence: Synthetic primer
gttcactcagcac

SEQ ID NO: 3439 - DNA, 13 bp, Artificial Sequence
  Description of Artificial Sequence: Synthetic primer
cagccttggccac

SEQ ID NO: 3440 - DNA, 13 bp, Artificial Sequence
  Description of Artificial Sequence: Synthetic primer
cccatgacggcca

SEQ ID NO: 3441 - DNA, 13 bp, Artificial Sequence
  Description of Artificial Sequence: Synthetic primer
ggcatcactgtta

SEQ ID NO: 3442 - DNA, 13 bp, Artificial Sequence
  Description of Artificial Sequence: Synthetic primer
ttcaaggagcctt

SEQ ID NO: 3443 - DNA, 13 bp, Artificial Sequence
  Description of Artificial Sequence: Synthetic primer
ggtcattccaatc

SEQ ID NO: 3444 - DNA, 13 bp, Artificial Sequence
  Description of Artificial Sequence: Synthetic primer
gtttgacgcctcc

SEQ ID NO: 3445 - DNA, 13 bp, Artificial Sequence
  Description of Artificial Sequence: Synthetic primer
aaggtcactccac

SEQ ID NO: 3446 - DNA, 13 bp, Artificial Sequence
  Description of Artificial Sequence: Synthetic primer
cctgccagcactc

SEQ ID NO: 3447 - DNA, 13 bp, Artificial Sequence
  Description of Artificial Sequence: Synthetic primer
gccatatacatgg

SEQ ID NO: 3448 - DNA, 13 bp, Artificial Sequence
  Description of Artificial Sequence: Synthetic primer
gcctgctgagtca

SEQ ID NO: 3449 - DNA, 13 bp, Artificial Sequence
  Description of Artificial Sequence: Synthetic primer
tccacctccacaa

SEQ ID NO: 3450 - DNA, 13 bp, Artificial Sequence
  Description of Artificial Sequence: Synthetic primer
atccggccaactc

SEQ ID NO: 3451 - DNA, 13 bp, Artificial Sequence
  Description of Artificial Sequence: Synthetic primer
agcctcatgtccc

SEQ ID NO: 3452 - DNA, 13 bp, Artificial Sequence
  Description of Artificial Sequence: Synthetic primer
gtgatggtgttca

SEQ ID NO: 3453 - DNA, 13 bp, Artificial Sequence
  Description of Artificial Sequence: Synthetic primer
agtgagctgagta

SEQ ID NO: 3454 - DNA, 13 bp, Artificial Sequence
  Description of Artificial Sequence: Synthetic primer
tcagctactatca

SEQ ID NO: 3455 - DNA, 13 bp, Artificial Sequence
  Description of Artificial Sequence: Synthetic primer
tctggtaaacatt

SEQ ID NO: 3456 - DNA, 13 bp, Artificial Sequence
  Description of Artificial Sequence: Synthetic primer
gccaagatctgtg

SEQ ID NO: 3457 - DNA, 13 bp, Artificial Sequence
  Description of Artificial Sequence: Synthetic primer
attttatcctctc

SEQ ID NO: 3458 - DNA, 13 bp, Artificial Sequence
  Description of Artificial Sequence: Synthetic primer
gttttccttggcc

SEQ ID NO: 3459 - DNA, 13 bp, Artificial Sequence
  Description of Artificial Sequence: Synthetic primer
tgcgctgcccaac

SEQ ID NO: 3460 - DNA, 13 bp, Artificial Sequence
  Description of Artificial Sequence: Synthetic primer
cacgcattgtccc

SEQ ID NO: 3461 - DNA, 13 bp, Artificial Sequence
  Description of Artificial Sequence: Synthetic primer
aagagcgacagcc

SEQ ID NO: 3462 - DNA, 13 bp, Artificial Sequence
  Description of Artificial Sequence: Synthetic primer
ggatatgattgtg

SEQ ID NO: 3463 - DNA, 13 bp, Artificial Sequence
  Description of Artificial Sequence: Synthetic primer
atgtgagatgccc

SEQ ID NO: 3464 - DNA, 13 bp, Artificial Sequence
  Description of Artificial Sequence: Synthetic primer
accctctcttcaa

SEQ ID NO: 3465 - DNA, 13 bp, Artificial Sequence
  Description of Artificial Sequence: Synthetic primer
ctgctatgctagc

SEQ ID NO: 3466 - DNA, 13 bp, Artificial Sequence
  Description of Artificial Sequence: Synthetic primer
gagatgtctacct

SEQ ID NO: 3467 - DNA, 13 bp, Artificial Sequence
  Description of Artificial Sequence: Synthetic primer
gccaatgacagca

SEQ ID NO: 3468 - DNA, 13 bp, Artificial Sequence
  Description of Artificial Sequence: Synthetic primer
aatcacacttgcc

SEQ ID NO: 3469 - DNA, 13 bp, Artificial Sequence
  Description of Artificial Sequence: Synthetic primer
ctcgggtagtcaa

SEQ ID NO: 3470 - DNA, 13 bp, Artificial Sequence
  Description of Artificial Sequence: Synthetic primer
aggctgggccaac

SEQ ID NO: 3471 - DNA, 13 bp, Artificial Sequence
  Description of Artificial Sequence: Synthetic primer
ccacgagaccagc

SEQ ID NO: 3472 - DNA, 13 bp, Artificial Sequence
  Description of Artificial Sequence: Synthetic primer
ggtctgatctcca

SEQ ID NO: 3473 - DNA, 13 bp, Artificial Sequence
  Description of Artificial Sequence: Synthetic primer
aacatgagatatc

SEQ ID NO: 3474 - DNA, 13 bp, Artificial Sequence
  Description of Artificial Sequence: Synthetic primer
acagctcaaactg

SEQ ID NO: 3475 - DNA, 13 bp, Artificial Sequence
  Description of Artificial Sequence: Synthetic primer
acaagtgtgcgca

SEQ ID NO: 3476 - DNA, 13 bp, Artificial Sequence
  Description of Artificial Sequence: Synthetic primer
ttgtctggacctt

SEQ ID NO: 3477 - DNA, 13 bp, Artificial Sequence
  Description of Artificial Sequence: Synthetic primer
tccttcattttct

SEQ ID NO: 3478 - DNA, 13 bp, Artificial Sequence
  Description of Artificial Sequence: Synthetic primer
gccacttgccatg

SEQ ID NO: 3479 - DNA, 13 bp, Artificial Sequence
  Description of Artificial Sequence: Synthetic primer
gacgtgccacatc

SEQ ID NO: 3480 - DNA, 13 bp, Artificial Sequence
  Description of Artificial Sequence: Synthetic primer
gctgtgagatcat

SEQ ID NO: 3481 - DNA, 13 bp, Artificial Sequence
  Description of Artificial Sequence: Synthetic primer
tctggccagctcc

SEQ ID NO: 3482 - DNA, 13 bp, Artificial Sequence
  Description of Artificial Sequence: Synthetic primer
cacatccttggtc

SEQ ID NO: 3483 - DNA, 13 bp, Artificial Sequence
  Description of Artificial Sequence: Synthetic primer
atcagcagcattc

SEQ ID NO: 3484 - DNA, 13 bp, Artificial Sequence
  Description of Artificial Sequence: Synthetic primer
tcttcaaggatcc

SEQ ID NO: 3485 - DNA, 13 bp, Artificial Sequence
  Description of Artificial Sequence: Synthetic primer
tgaagcatggcgc

SEQ ID NO: 3486 - DNA, 13 bp, Artificial Sequence
  Description of Artificial Sequence: Synthetic primer
ctcctccgttatt

SEQ ID NO: 3487 - DNA, 13 bp, Artificial Sequence
  Description of Artificial Sequence: Synthetic primer
gtcaccacctgcc

SEQ ID NO: 3488 - DNA, 13 bp, Artificial Sequence
  Description of Artificial Sequence: Synthetic primer
caatgcgtcctct

SEQ ID NO: 3489 - DNA, 13 bp, Artificial Sequence
  Description of Artificial Sequence: Synthetic primer
ccatcattttcct

SEQ ID NO: 3490 - DNA, 13 bp, Artificial Sequence
  Description of Artificial Sequence: Synthetic primer
catcacagtccac

SEQ ID NO: 3491 - DNA, 13 bp, Artificial Sequence
  Description of Artificial Sequence: Synthetic primer
ttctctatcacat

SEQ ID NO: 3492 - DNA, 13 bp, Artificial Sequence
  Description of Artificial Sequence: Synthetic primer
ggtttcagatcca

SEQ ID NO: 3493 - DNA, 13 bp, Artificial Sequence
  Description of Artificial Sequence: Synthetic primer
gccacaatcacgg

SEQ ID NO: 3494 - DNA, 13 bp, Artificial Sequence
  Description of Artificial Sequence: Synthetic primer
ctggtcccagggc

SEQ ID NO: 3495 - DNA, 13 bp, Artificial Sequence
  Description of Artificial Sequence: Synthetic primer
catcactgcaaga

SEQ ID NO: 3496 - DNA, 13 bp, Artificial Sequence
  Description of Artificial Sequence: Synthetic primer
agtgccatcaggg

SEQ ID NO: 3497 - DNA, 13 bp, Artificial Sequence
  Description of Artificial Sequence: Synthetic primer
tctaccaccacgt

SEQ ID NO: 3498 - DNA, 13 bp, Artificial Sequence
  Description of Artificial Sequence: Synthetic primer
gccattctgaaat

SEQ ID NO: 3499 - DNA, 13 bp, Artificial Sequence
  Description of Artificial Sequence: Synthetic primer
ctaaggaaaaagg

SEQ ID NO: 3500 - DNA, 13 bp, Artificial Sequence
  Description of Artificial Sequence: Synthetic primer
ggcatcgcccctg

SEQ ID NO: 3501 - DNA, 13 bp, Artificial Sequence
  Description of Artificial Sequence: Synthetic primer
gcaggagggtctt

SEQ ID NO: 3502 - DNA, 13 bp, Artificial Sequence
  Description of Artificial Sequence: Synthetic primer
catgtacatggca

SEQ ID NO: 3503 - DNA, 13 bp, Artificial Sequence
  Description of Artificial Sequence: Synthetic primer
gtttctcatggcc

SEQ ID NO: 3504 - DNA, 13 bp, Artificial Sequence
  Description of Artificial Sequence: Synthetic primer
tgaattcagcctc

SEQ ID NO: 3505 - DNA, 13 bp, Artificial Sequence
  Description of Artificial Sequence: Synthetic primer
tgatgtctgttct

SEQ ID NO: 3506 - DNA, 13 bp, Artificial Sequence
  Description of Artificial Sequence: Synthetic primer
gtgtcatccgcat

SEQ ID NO: 3507 - DNA, 13 bp, Artificial Sequence
  Description of Artificial Sequence: Synthetic primer
gggagctcactca

SEQ ID NO: 3508 - DNA, 13 bp, Artificial Sequence
  Description of Artificial Sequence: Synthetic primer
ccaccacattttt

SEQ ID NO: 3509 - DNA, 13 bp, Artificial Sequence
  Description of Artificial Sequence: Synthetic primer
cttccataggcca

SEQ ID NO: 3510 - DNA, 13 bp, Artificial Sequence
  Description of Artificial Sequence: Synthetic primer
tggtgatggtatt

SEQ ID NO: 3511 - DNA, 13 bp, Artificial Sequence
  Description of Artificial Sequence: Synthetic primer
tatgcaatgggca

SEQ ID NO: 3512 - DNA, 13 bp, Artificial Sequence
  Description of Artificial Sequence: Synthetic primer
ttctggcacactc

SEQ ID NO: 3513 - DNA, 13 bp, Artificial Sequence
  Description of Artificial Sequence: Synthetic primer
cccaccaagccag

SEQ ID NO: 3514 - DNA, 13 bp, Artificial Sequence
  Description of Artificial Sequence: Synthetic primer
ccaccaatgccgc

SEQ ID NO: 3515 - DNA, 13 bp, Artificial Sequence
  Description of Artificial Sequence: Synthetic primer
acttttagattgg

SEQ ID NO: 3516 - DNA, 13 bp, Artificial Sequence
  Description of Artificial Sequence: Synthetic primer
actcctcctgata

SEQ ID NO: 3517 - DNA, 13 bp, Artificial Sequence
  Description of Artificial Sequence: Synthetic primer
tccttatccaatg

SEQ ID NO: 3518 - DNA, 13 bp, Artificial Sequence
  Description of Artificial Sequence: Synthetic primer
aggttccactggg

SEQ ID NO: 3519 - DNA, 13 bp, Artificial Sequence
  Description of Artificial Sequence: Synthetic primer
gctaaaatcccag

SEQ ID NO: 3520 - DNA, 13 bp, Artificial Sequence
  Description of Artificial Sequence: Synthetic primer
aactccgtgagga

SEQ ID NO: 3521 - DNA, 13 bp, Artificial Sequence
  Description of Artificial Sequence: Synthetic primer
ccctcttgtgaaa

SEQ ID NO: 3522 - DNA, 13 bp, Artificial Sequence
  Description of Artificial Sequence: Synthetic primer
gtacacacaggtc

SEQ ID NO: 3523 - DNA, 13 bp, Artificial Sequence
  Description of Artificial Sequence: Synthetic primer
gcaccttgtaacc

SEQ ID NO: 3524 - DNA, 13 bp, Artificial Sequence
  Description of Artificial Sequence: Synthetic primer
acaataggagatc

SEQ ID NO: 3525 - DNA, 13 bp, Artificial Sequence
  Description of Artificial Sequence: Synthetic primer
gtctaatctccat

SEQ ID NO: 3526 - DNA, 13 bp, Artificial Sequence
  Description of Artificial Sequence: Synthetic primer
gccatcaagggca

SEQ ID NO: 3527 - DNA, 13 bp, Artificial Sequence
  Description of Artificial Sequence: Synthetic primer
gctgcccagcctc

SEQ ID NO: 3528 - DNA, 13 bp, Artificial Sequence
  Description of Artificial Sequence: Synthetic primer
accatccattgca

SEQ ID NO: 3529 - DNA, 13 bp, Artificial Sequence
  Description of Artificial Sequence: Synthetic primer
gtctcctccattg

SEQ ID NO: 3530 - DNA, 13 bp, Artificial Sequence
  Description of Artificial Sequence: Synthetic primer
cgcattatccccc

SEQ ID NO: 3531 - DNA, 13 bp, Artificial Sequence
  Description of Artificial Sequence: Synthetic primer
aacatgaggtatc

SEQ ID NO: 3532 - DNA, 13 bp, Artificial Sequence
  Description of Artificial Sequence: Synthetic primer
gtagatgttcttt

SEQ ID NO: 3533 - DNA, 13 bp, Artificial Sequence
  Description of Artificial Sequence: Synthetic primer
tgacagggcatca

SEQ ID NO: 3534 - DNA, 13 bp, Artificial Sequence
  Description of Artificial Sequence: Synthetic primer
tccgaccaaagcc

SEQ ID NO: 3535 - DNA, 13 bp, Artificial Sequence
  Description of Artificial Sequence: Synthetic primer
caggaatatgatt

SEQ ID NO: 3536 - DNA, 13 bp, Artificial Sequence
  Description of Artificial Sequence: Synthetic primer
tgggaagtctcag

SEQ ID NO: 3537 - DNA, 13 bp, Artificial Sequence
  Description of Artificial Sequence: Synthetic primer
cccagggccaaca

SEQ ID NO: 3538 - DNA, 13 bp, Artificial Sequence
  Description of Artificial Sequence: Synthetic primer
ggagtccggttct

SEQ ID NO: 3539 - DNA, 13 bp, Artificial Sequence
  Description of Artificial Sequence: Synthetic primer
caatgggtgaacc

SEQ ID NO: 3540 - DNA, 13 bp, Artificial Sequence
  Description of Artificial Sequence: Synthetic primer
ccagcagagctga

SEQ ID NO: 3541 - DNA, 13 bp, Artificial Sequence
  Description of Artificial Sequence: Synthetic primer
ccgtgagaaccac

SEQ ID NO: 3542 - DNA, 13 bp, Artificial Sequence
  Description of Artificial Sequence: Synthetic primer
aaacaggcaggtc

SEQ ID NO: 3543 - DNA, 13 bp, Artificial Sequence
  Description of Artificial Sequence: Synthetic primer
atcaccatgctca

SEQ ID NO: 3544 - DNA, 13 bp, Artificial Sequence
  Description of Artificial Sequence: Synthetic primer
aatcctccccctt

SEQ ID NO: 3545 - DNA, 13 bp, Artificial Sequence
  Description of Artificial Sequence: Synthetic primer
atgtggccctgtt

SEQ ID NO: 3546 - DNA, 13 bp, Artificial Sequence
  Description of Artificial Sequence: Synthetic primer
gggggatcactgt

SEQ ID NO: 3547 - DNA, 13 bp, Artificial Sequence
  Description of Artificial Sequence: Synthetic primer
atgccttcggcta

SEQ ID NO: 3548 - DNA, 13 bp, Artificial Sequence
  Description of Artificial Sequence: Synthetic primer
gtctaatttccat

SEQ ID NO: 3549 - DNA, 13 bp, Artificial Sequence
  Description of Artificial Sequence: Synthetic primer
tcatgggcttttc

SEQ ID NO: 3550 - DNA, 13 bp, Artificial Sequence
  Description of Artificial Sequence: Synthetic primer
accagatggcttt

SEQ ID NO: 3551 - DNA, 13 bp, Artificial Sequence
  Description of Artificial Sequence: Synthetic primer
acctgccaggata

SEQ ID NO: 3552 - DNA, 13 bp, Artificial Sequence
  Description of Artificial Sequence: Synthetic primer
tacagctcaaatt

SEQ ID NO: 3553 - DNA, 13 bp, Artificial Sequence
  Description of Artificial Sequence: Synthetic primer
gtcagttatccca

SEQ ID NO: 3554 - DNA, 13 bp, Artificial Sequence
  Description of Artificial Sequence: Synthetic primer
tcagcaacgggta

SEQ ID NO: 3555 - DNA, 13 bp, Artificial Sequence
  Description of Artificial Sequence: Synthetic primer
gccatcgtggtgg

SEQ ID NO: 3556 - DNA, 13 bp, Artificial Sequence
  Description of Artificial Sequence: Synthetic primer
tgggagatgctac

SEQ ID NO: 3557 - DNA, 13 bp, Artificial Sequence
  Description of Artificial Sequence: Synthetic primer
tccatgaaaatga

SEQ ID NO: 3558 - DNA, 13 bp, Artificial Sequence
  Description of Artificial Sequence: Synthetic primer
acggttcaacagc

SEQ ID NO: 3559 - DNA, 13 bp, Artificial Sequence
  Description of Artificial Sequence: Synthetic primer
tgaagtggacaaa

SEQ ID NO: 3560 - DNA, 13 bp, Artificial Sequence
  Description of Artificial Sequence: Synthetic primer
atccaaatgatca

SEQ ID NO: 3561 - DNA, 13 bp, Artificial Sequence
  Description of Artificial Sequence: Synthetic primer
ggacaatttgctt

SEQ ID NO: 3562 - DNA, 13 bp, Artificial Sequence
  Description of Artificial Sequence: Synthetic primer
gctgcccaaagaa

SEQ ID NO: 3563 - DNA, 13 bp, Artificial Sequence
  Description of Artificial Sequence: Synthetic primer
atgaaggaaatgc

SEQ ID NO: 3564 - DNA, 13 bp, Artificial Sequence
  Description of Artificial Sequence: Synthetic primer
atgatgactttct

SEQ ID NO: 3565 - DNA, 13 bp, Artificial Sequence
  Description of Artificial Sequence: Synthetic primer
tcttcggctggtt

SEQ ID NO: 3566 - DNA, 13 bp, Artificial Sequence
  Description of Artificial Sequence: Synthetic primer
cagctatgaaaga

SEQ ID NO: 3567 - DNA, 13 bp, Artificial Sequence
  Description of Artificial Sequence: Synthetic primer
tgcagaaccgcgt

SEQ ID NO: 3568 - DNA, 13 bp, Artificial Sequence
  Description of Artificial Sequence: Synthetic primer
gcggtgatcctga

SEQ ID NO: 3569 - DNA, 13 bp, Artificial Sequence
  Description of Artificial Sequence: Synthetic primer
tgggtgatcgcca

SEQ ID NO: 3570 - DNA, 13 bp, Artificial Sequence
  Description of Artificial Sequence: Synthetic primer
aaaggtaagtata

SEQ ID NO: 3571 - DNA, 13 bp, Artificial Sequence
  Description of Artificial Sequence: Synthetic primer
cagaacgcccagg

SEQ ID NO: 3572 - DNA, 13 bp, Artificial Sequence
  Description of Artificial Sequence: Synthetic primer
ggccgatcttcgc

SEQ ID NO: 3573 - DNA, 13 bp, Artificial Sequence
  Description of Artificial Sequence: Synthetic primer
gcgttcttcgccg

SEQ ID NO: 3574 - DNA, 13 bp, Artificial Sequence
  Description of Artificial Sequence: Synthetic primer
attttacaaccag

SEQ ID NO: 3575 - DNA, 13 bp, Artificial Sequence
  Description of Artificial Sequence: Synthetic primer
aaggcaagtatat

SEQ ID NO: 3576 - DNA, 13 bp, Artificial Sequence
  Description of Artificial Sequence: Synthetic primer
ggtttgttgagaa

SEQ ID NO: 3577 - DNA, 13 bp, Artificial Sequence
  Description of Artificial Sequence: Synthetic primer
caggtgcagaaca

SEQ ID NO: 3578 - DNA, 13 bp, Artificial Sequence
  Description of Artificial Sequence: Synthetic primer
ataatgtctatgc

SEQ ID NO: 3579 - DNA, 13 bp, Artificial Sequence
  Description of Artificial Sequence: Synthetic primer
atccgcgagcaga

SEQ ID NO: 3580 - DNA, 13 bp, Artificial Sequence
  Description of Artificial Sequence: Synthetic primer
aaggaaagtacat

SEQ ID NO: 3581 - DNA, 13 bp, Artificial Sequence
  Description of Artificial Sequence: Synthetic primer
cgacgatcaggat

SEQ ID NO: 3582 - DNA, 13 bp, Artificial Sequence
  Description of Artificial Sequence: Synthetic primer
ttttctcaagggt

SEQ ID NO: 3583 - DNA, 13 bp, Artificial Sequence
  Description of Artificial Sequence: Synthetic primer
catacctggatta

SEQ ID NO: 3584 - DNA, 13 bp, Artificial Sequence
  Description of Artificial Sequence: Synthetic primer
atggccgagctga

SEQ ID NO: 3585 - DNA, 13 bp, Artificial Sequence
  Description of Artificial Sequence: Synthetic primer
gttgacgcaggaa

SEQ ID NO: 3586 - DNA, 13 bp, Artificial Sequence
  Description of Artificial Sequence: Synthetic primer
ttgatgcagatac

SEQ ID NO: 3587 - DNA, 13 bp, Artificial Sequence
  Description of Artificial Sequence: Synthetic primer
taaccgatatgat

SEQ ID NO: 3588 - DNA, 13 bp, Artificial Sequence
  Description of Artificial Sequence: Synthetic primer
ggagaatttgcca

SEQ ID NO: 3589 - DNA, 13 bp, Artificial Sequence
  Description of Artificial Sequence: Synthetic primer
ccatcaggaagct

SEQ ID NO: 3590 - DNA, 13 bp, Artificial Sequence
  Description of Artificial Sequence: Synthetic primer
aagtcgtattgcg

SEQ ID NO: 3591 - DNA, 13 bp, Artificial Sequence
  Description of Artificial Sequence: Synthetic primer
ccatcgtcgtggt

SEQ ID NO: 3592 - DNA, 13 bp, Artificial Sequence
  Description of Artificial Sequence: Synthetic primer
ccgttaacggctt

SEQ ID NO: 3593 - DNA, 13 bp, Artificial Sequence
  Description of Artificial Sequence: Synthetic primer
ctgaagatgcgac

SEQ ID NO: 3594 - DNA, 13 bp, Artificial Sequence
  Description of Artificial Sequence: Synthetic primer
aatcctgtttcca

SEQ ID NO: 3595 - DNA, 13 bp, Artificial Sequence
  Description of Artificial Sequence: Synthetic primer
tacgcagcagggc

SEQ ID NO: 3596 - DNA, 13 bp, Artificial Sequence
  Description of Artificial Sequence: Synthetic primer
gctgtacaaggaa

SEQ ID NO: 3597 - DNA, 13 bp, Artificial Sequence
  Description of Artificial Sequence: Synthetic primer
tactaacaatcag

SEQ ID NO: 3598 - DNA, 13 bp, Artificial Sequence
  Description of Artificial Sequence: Synthetic primer
atcaaagtaacta

SEQ ID NO: 3599 - DNA, 13 bp, Artificial Sequence
  Description of Artificial Sequence: Synthetic primer
ctgaatcacaatt

SEQ ID NO: 3600 - DNA, 13 bp, Artificial Sequence
  Description of Artificial Sequence: Synthetic primer
tcctgattttatc

SEQ ID NO: 3601 - DNA, 13 bp, Artificial Sequence
  Description of Artificial Sequence: Synthetic primer
ttctgcgcgacgt

SEQ ID NO: 3602 - DNA, 13 bp, Artificial Sequence
  Description of Artificial Sequence: Synthetic primer
ccaacctttgatg

SEQ ID NO: 3603 - DNA, 13 bp, Artificial Sequence
  Description of Artificial Sequence: Synthetic primer
gcatgtcgtagcg

SEQ ID NO: 3604 - DNA, 13 bp, Artificial Sequence
  Description of Artificial Sequence: Synthetic primer
ggcggcctatcga

SEQ ID NO: 3605 - DNA, 13 bp, Artificial Sequence
  Description of Artificial Sequence: Synthetic primer
ctgagtttattat

SEQ ID NO: 3606 - DNA, 13 bp, Artificial Sequence
  Description of Artificial Sequence: Synthetic primer
tattcttgcaggg

SEQ ID NO: 3607 - DNA, 13 bp, Artificial Sequence
  Description of Artificial Sequence: Synthetic primer
atgcaaatgaaga

SEQ ID NO: 3608 - DNA, 13 bp, Artificial Sequence
  Description of Artificial Sequence: Synthetic primer
gacgatgcgatcg

SEQ ID NO: 3609 - DNA, 13 bp, Artificial Sequence
  Description of Artificial Sequence: Synthetic primer
aatactggcctga

SEQ ID NO: 3610 - DNA, 13 bp, Artificial Sequence
  Description of Artificial Sequence: Synthetic primer
agtcctgtaagta

SEQ ID NO: 3611 - DNA, 13 bp, Artificial Sequence
  Description of Artificial Sequence: Synthetic primer
tgaagatgcagca

SEQ ID NO: 3612 - DNA, 13 bp, Artificial Sequence
  Description of Artificial Sequence: Synthetic primer
ttctcgaactctt

SEQ ID NO: 3613 - DNA, 13 bp, Artificial Sequence
  Description of Artificial Sequence: Synthetic primer
ttattacacatgc

SEQ ID NO: 3614 - DNA, 13 bp, Artificial Sequence
  Description of Artificial Sequence: Synthetic primer
gcgggaggaacag

SEQ ID NO: 3615 - DNA, 13 bp, Artificial Sequence
  Description of Artificial Sequence: Synthetic primer
gctgaagcagccg

SEQ ID NO: 3616 - DNA, 13 bp, Artificial Sequence
  Description of Artificial Sequence: Synthetic primer
agaggtctttcat

SEQ ID NO: 3617 - DNA, 13 bp, Artificial Sequence
  Description of Artificial Sequence: Synthetic primer
agtattgtttatc

SEQ ID NO: 3618 - DNA, 13 bp, Artificial Sequence
  Description of Artificial Sequence: Synthetic primer
caacaattggaaa

SEQ ID NO: 3619 - DNA, 13 bp, Artificial Sequence
  Description of Artificial Sequence: Synthetic primer
gtgtgcaagcaca

SEQ ID NO: 3620 - DNA, 13 bp, Artificial Sequence
  Description of Artificial Sequence: Synthetic primer
gggttatcggtgc

SEQ ID NO: 3621 - DNA, 13 bp, Artificial Sequence
  Description of Artificial Sequence: Synthetic primer
aagcgcgtcagtt

SEQ ID NO: 3622 - DNA, 13 bp, Artificial Sequence
  Description of Artificial Sequence: Synthetic primer
ttttcgcctgggt

SEQ ID NO: 3623 - DNA, 13 bp, Artificial Sequence
  Description of Artificial Sequence: Synthetic primer
tgatcgagcccgg

SEQ ID NO: 3624 - DNA, 13 bp, Artificial Sequence
  Description of Artificial Sequence: Synthetic primer
ttctttggctggt

SEQ ID NO: 3625 - DNA, 13 bp, Artificial Sequence
  Description of Artificial Sequence: Synthetic primer
ggctgtgaggtcg

SEQ ID NO: 3626 - DNA, 13 bp, Artificial Sequence
  Description of Artificial Sequence: Synthetic primer
gactggctcacgc

SEQ ID NO: 3627 - DNA, 13 bp, Artificial Sequence
  Description of Artificial Sequence: Synthetic primer
tcttcatcgatcg

SEQ ID NO: 3628 - DNA, 13 bp, Artificial Sequence
  Description of Artificial Sequence: Synthetic primer
accaccagcacca

SEQ ID NO: 3629 - DNA, 13 bp, Artificial Sequence
  Description of Artificial Sequence: Synthetic primer
atccgatctacgt

SEQ ID NO: 3630 - DNA, 13 bp, Artificial Sequence
  Description of Artificial Sequence: Synthetic primer
gcgagatgatccc

SEQ ID NO: 3631 - DNA, 13 bp, Artificial Sequence
  Description of Artificial Sequence: Synthetic primer
cgtattcgccgga

SEQ ID NO: 3632 - DNA, 13 bp, Artificial Sequence
  Description of Artificial Sequence: Synthetic primer
tcatcgcccgctt

SEQ ID NO: 3633 - DNA, 13 bp, Artificial Sequence
  Description of Artificial Sequence: Synthetic primer
cagaactacttcg

SEQ ID NO: 3634 - DNA, 13 bp, Artificial Sequence
  Description of Artificial Sequence: Synthetic primer
aaagatgcagcta

SEQ ID NO: 3635 - DNA, 13 bp, Artificial Sequence
  Description of Artificial Sequence: Synthetic primer
tggtcgatgacgc

SEQ ID NO: 3636 - DNA, 13 bp, Artificial Sequence
  Description of Artificial Sequence: Synthetic primer
tcatttggacaag

SEQ ID NO: 3637 - DNA, 13 bp, Artificial Sequence
  Description of Artificial Sequence: Synthetic primer
cgctacaacggct

SEQ ID NO: 3638 - DNA, 13 bp, Artificial Sequence
  Description of Artificial Sequence: Synthetic primer
gcggcgttcttcc

SEQ ID NO: 3639 - DNA, 13 bp, Artificial Sequence
  Description of Artificial Sequence: Synthetic primer
ctgatcagcaagc

SEQ ID NO: 3640 - DNA, 13 bp, Artificial Sequence
  Description of Artificial Sequence: Synthetic primer
cggatatgtattc

SEQ ID NO: 3641 - DNA, 13 bp, Artificial Sequence
  Description of Artificial Sequence: Synthetic primer
tgccatgaagccg

SEQ ID NO: 3642 - DNA, 13 bp, Artificial Sequence
  Description of Artificial Sequence: Synthetic primer
ctaacagaagcta

SEQ ID NO: 3643 - DNA, 13 bp, Artificial Sequence
  Description of Artificial Sequence: Synthetic primer
tggtatattctgc

SEQ ID NO: 3644 - DNA, 13 bp, Artificial Sequence
  Description of Artificial Sequence: Synthetic primer
ggatacccgccat

SEQ ID NO: 3645 - DNA, 13 bp, Artificial Sequence
  Description of Artificial Sequence: Synthetic primer
acccaacgaccta

SEQ ID NO: 3646 - DNA, 13 bp, Artificial Sequence
  Description of Artificial Sequence: Synthetic primer
acgacagaatctt

SEQ ID NO: 3647 - DNA, 13 bp, Artificial Sequence
  Description of Artificial Sequence: Synthetic primer
ttcaggtccagaa

SEQ ID NO: 3648 - DNA, 13 bp, Artificial Sequence
  Description of Artificial Sequence: Synthetic primer
aagtgcagaaccg

SEQ ID NO: 3649 - DNA, 13 bp, Artificial Sequence
  Description of Artificial Sequence: Synthetic primer
ccccaaataacat

SEQ ID NO: 3650 - DNA, 13 bp, Artificial Sequence
  Description of Artificial Sequence: Synthetic primer
ctatgtataatca

SEQ ID NO: 3651 - DNA, 13 bp, Artificial Sequence
  Description of Artificial Sequence: Synthetic primer
acgcgacgagcac

SEQ ID NO: 3652 - DNA, 13 bp, Artificial Sequence
  Description of Artificial Sequence: Synthetic primer
aggagatcaaccg

SEQ ID NO: 3653 - DNA, 13 bp, Artificial Sequence
  Description of Artificial Sequence: Synthetic primer
acgttaatgaagg

SEQ ID NO: 3654 - DNA, 13 bp, Artificial Sequence
  Description of Artificial Sequence: Synthetic primer
gtgtcgaagatgt

SEQ ID NO: 3655 - DNA, 13 bp, Artificial Sequence
  Description of Artificial Sequence: Synthetic primer
cgtatagccgagg

SEQ ID NO: 3656 - DNA, 13 bp, Artificial Sequence
  Description of Artificial Sequence: Synthetic primer
caaatttcataag

SEQ ID NO: 3657 - DNA, 13 bp, Artificial Sequence
  Description of Artificial Sequence: Synthetic primer
gcgatccggtcac

SEQ ID NO: 3658 - DNA, 13 bp, Artificial Sequence
  Description of Artificial Sequence: Synthetic primer
tttccggcgtcgg

SEQ ID NO: 3659 - DNA, 13 bp, Artificial Sequence
  Description of Artificial Sequence: Synthetic primer
tttgcggttaacg

SEQ ID NO: 3660 - DNA, 13 bp, Artificial Sequence
  Description of Artificial Sequence: Synthetic primer
atttggtgttccg

SEQ ID NO: 3661 - DNA, 13 bp, Artificial Sequence
  Description of Artificial Sequence: Synthetic primer
ggcattactgttt

SEQ ID NO: 3662 - DNA, 13 bp, Artificial Sequence
  Description of Artificial Sequence: Synthetic primer
attgttcggacag

SEQ ID NO: 3663 - DNA, 13 bp, Artificial Sequence
  Description of Artificial Sequence: Synthetic primer
catggcttcgccg

SEQ ID NO: 3664 - DNA, 13 bp, Artificial Sequence
  Description of Artificial Sequence: Synthetic primer
catcgccttgacc

SEQ ID NO: 3665 - DNA, 13 bp, Artificial Sequence
  Description of Artificial Sequence: Synthetic primer
tggcgttcttggc

SEQ ID NO: 3666 - DNA, 13 bp, Artificial Sequence
  Description of Artificial Sequence: Synthetic primer
atggaaccgttct

SEQ ID NO: 3667 - DNA, 13 bp, Artificial Sequence
  Description of Artificial Sequence: Synthetic primer
tataaagaagaag

SEQ ID NO: 3668 - DNA, 13 bp, Artificial Sequence
  Description of Artificial Sequence: Synthetic primer
tgggtaaatattt

SEQ ID NO: 3669 - DNA, 13 bp, Artificial Sequence
  Description of Artificial Sequence: Synthetic primer
caggattacttcc

SEQ ID NO: 3670 - DNA, 13 bp, Artificial Sequence
  Description of Artificial Sequence: Synthetic primer
gcacgcggatcgt

SEQ ID NO: 3671 - DNA, 13 bp, Artificial Sequence
  Description of Artificial Sequence: Synthetic primer
gatgtctttcggt

SEQ ID NO: 3672 - DNA, 13 bp, Artificial Sequence
  Description of Artificial Sequence: Synthetic primer
cgacgacgcgatc

SEQ ID NO: 3673 - DNA, 13 bp, Artificial Sequence
  Description of Artificial Sequence: Synthetic primer
cttcaccggtact

SEQ ID NO: 3674 - DNA, 13 bp, Artificial Sequence
  Description of Artificial Sequence: Synthetic primer
caacacccttaat

SEQ ID NO: 3675 - DNA, 13 bp, Artificial Sequence
  Description of Artificial Sequence: Synthetic primer
tacggcgaagggc

SEQ ID NO: 3676 - DNA, 13 bp, Artificial Sequence
  Description of Artificial Sequence: Synthetic primer
tggatctgctcca

SEQ ID NO: 3677 - DNA, 13 bp, Artificial Sequence
  Description of Artificial Sequence: Synthetic primer
cgcgaggtgtcgt

SEQ ID NO: 3678 - DNA, 13 bp, Artificial Sequence
  Description of Artificial Sequence: Synthetic primer
cagaacttcctcg

SEQ ID NO: 3679 - DNA, 13 bp, Artificial Sequence
  Description of Artificial Sequence: Synthetic primer
ggggttatcggcg

SEQ ID NO: 3680 - DNA, 13 bp, Artificial Sequence
  Description of Artificial Sequence: Synthetic primer
tgatgaccttttc

SEQ ID NO: 3681 - DNA, 13 bp, Artificial Sequence
  Description of Artificial Sequence: Synthetic primer
tgtcgaaatggcg

SEQ ID NO: 3682 - DNA, 13 bp, Artificial Sequence
  Description of Artificial Sequence: Synthetic primer
tctatgttgacgt

SEQ ID NO: 3683 - DNA, 13 bp, Artificial Sequence
  Description of Artificial Sequence: Synthetic primer
tgcaggaaggttt

SEQ ID NO: 3684 - DNA, 13 bp, Artificial Sequence
  Description of Artificial Sequence: Synthetic primer
gcgtagttgcgca

SEQ ID NO: 3685 - DNA, 13 bp, Artificial Sequence
  Description of Artificial Sequence: Synthetic primer
accatacgtggat

SEQ ID NO: 3686 - DNA, 13 bp, Artificial Sequence
  Description of Artificial Sequence: Synthetic primer
tgcgtcaggtcac

SEQ ID NO: 3687 - DNA, 13 bp, Artificial Sequence
  Description of Artificial Sequence: Synthetic primer
accacttcgttaa

SEQ ID NO: 3688 - DNA, 13 bp, Artificial Sequence
  Description of Artificial Sequence: Synthetic primer
tgatgttcgccgg

SEQ ID NO: 3689 - DNA, 13 bp, Artificial Sequence
  Description of Artificial Sequence: Synthetic primer
accagataacggc

SEQ ID NO: 3690 - DNA, 13 bp, Artificial Sequence
  Description of Artificial Sequence: Synthetic primer
ctggtctgctcga

SEQ ID NO: 3691 - DNA, 13 bp, Artificial Sequence
  Description of Artificial Sequence: Synthetic primer
tgcactggcggtt

SEQ ID NO: 3692 - DNA, 13 bp, Artificial Sequence
  Description of Artificial Sequence: Synthetic primer
acagtggtaaagg

SEQ ID NO: 3693 - DNA, 13 bp, Artificial Sequence
  Description of Artificial Sequence: Synthetic primer
caacaacgcaacg

SEQ ID NO: 3694 - DNA, 13 bp, Artificial Sequence
  Description of Artificial Sequence: Synthetic primer
ccaacgttgaatc

SEQ ID NO: 3695 - DNA, 13 bp, Artificial Sequence
  Description of Artificial Sequence: Synthetic primer
gcgaaccagaacc

SEQ ID NO: 3696 - DNA, 13 bp, Artificial Sequence
  Description of Artificial Sequence: Synthetic primer
aaggcgatctggc

SEQ ID NO: 3697 - DNA, 13 bp, Artificial Sequence
  Description of Artificial Sequence: Synthetic primer
tggtattgatatc

SEQ ID NO: 3698 - DNA, 13 bp, Artificial Sequence
  Description of Artificial Sequence: Synthetic primer
gacgcgattgtgg

SEQ ID NO: 3699 - DNA, 13 bp, Artificial Sequence
  Description of Artificial Sequence: Synthetic primer
accctctgatgtc

SEQ ID NO: 3700 - DNA, 13 bp, Artificial Sequence
  Description of Artificial Sequence: Synthetic primer
gccgattataccg

SEQ ID NO: 3701 - DNA, 13 bp, Artificial Sequence
  Description of Artificial Sequence: Synthetic primer
ttgaattgtccgg

SEQ ID NO: 3702 - DNA, 13 bp, Artificial Sequence
  Description of Artificial Sequence: Synthetic primer
tagcccgtaaacg

SEQ ID NO: 3703 - DNA, 13 bp, Artificial Sequence
  Description of Artificial Sequence: Synthetic primer
taaatctggtctt

SEQ ID NO: 3704 - DNA, 13 bp, Artificial Sequence
  Description of Artificial Sequence: Synthetic primer
tcgaagaatggag

SEQ ID NO: 3705 - DNA, 13 bp, Artificial Sequence
  Description of Artificial Sequence: Synthetic primer
tggagttaattgc

SEQ ID NO: 3706 - DNA, 13 bp, Artificial Sequence
  Description of Artificial Sequence: Synthetic primer
cggttcctcgaca

SEQ ID NO: 3707 - DNA, 13 bp, Artificial Sequence
  Description of Artificial Sequence: Synthetic primer
ggccgatctttgc

SEQ ID NO: 3708 - DNA, 13 bp, Artificial Sequence
  Description of Artificial Sequence: Synthetic primer
ggttcaggtgcaa

SEQ ID NO: 3709 - DNA, 13 bp, Artificial Sequence
  Description of Artificial Sequence: Synthetic primer
aacgcgagcggca

SEQ ID NO: 3710 - DNA, 13 bp, Artificial Sequence
  Description of Artificial Sequence: Synthetic primer
ccttgaccgaacg

SEQ ID NO: 3711 - DNA, 13 bp, Artificial Sequence
  Description of Artificial Sequence: Synthetic primer
gaacacgatcacg

SEQ ID NO: 3712 - DNA, 13 bp, Artificial Sequence
  Description of Artificial Sequence: Synthetic primer
ggctgaactcttc

SEQ ID NO: 3713 - DNA, 13 bp, Artificial Sequence
  Description of Artificial Sequence: Synthetic primer
tagcaatttctaa

SEQ ID NO: 3714 - DNA, 13 bp, Artificial Sequence
  Description of Artificial Sequence: Synthetic primer
agaccgccaagag

SEQ ID NO: 3715 - DNA, 13 bp, Artificial Sequence
  Description of Artificial Sequence: Synthetic primer
gccagggctcaac

SEQ ID NO: 3716 - DNA, 13 bp, Artificial Sequence
  Description of Artificial Sequence: Synthetic primer
tcaccgcgtctgg

SEQ ID NO: 3717 - DNA, 13 bp, Artificial Sequence
  Description of Artificial Sequence: Synthetic primer
gctagtcctgtta

SEQ ID NO: 3718 - DNA, 13 bp, Artificial Sequence
  Description of Artificial Sequence: Synthetic primer
acccacgatccgc

SEQ ID NO: 3719 - DNA, 13 bp, Artificial Sequence
  Description of Artificial Sequence: Synthetic primer
tcagaatcgcgtt

SEQ ID NO: 3720 - DNA, 13 bp, Artificial Sequence
  Description of Artificial Sequence: Synthetic primer
cctacgcacctcc

SEQ ID NO: 3721 - DNA, 13 bp, Artificial Sequence
  Description of Artificial Sequence: Synthetic primer
gccatccccatca

SEQ ID NO: 3722 - DNA, 13 bp, Artificial Sequence
  Description of Artificial Sequence: Synthetic primer
tgcgcgattttcg

SEQ ID NO: 3723 - DNA, 13 bp, Artificial Sequence
  Description of Artificial Sequence: Synthetic primer
gcgcttttcgcag

SEQ ID NO: 3724 - DNA, 13 bp, Artificial Sequence
  Description of Artificial Sequence: Synthetic primer
cgattgcggaaaa

SEQ ID NO: 3725 - DNA, 13 bp, Artificial Sequence
  Description of Artificial Sequence: Synthetic primer
atcgaccgcgcca

SEQ ID NO: 3726 - DNA, 13 bp, Artificial Sequence
  Description of Artificial Sequence: Synthetic primer
tgctggtcggcgt

SEQ ID NO: 3727 - DNA, 13 bp, Artificial Sequence
  Description of Artificial Sequence: Synthetic primer
agcaacgatgcct

SEQ ID NO: 3728 - DNA, 13 bp, Artificial Sequence
  Description of Artificial Sequence: Synthetic primer
cggtcgatgtcga

SEQ ID NO: 3729 - DNA, 13 bp, Artificial Sequence
  Description of Artificial Sequence: Synthetic primer
tcaataccattcc

SEQ ID NO: 3730 - DNA, 13 bp, Artificial Sequence
  Description of Artificial Sequence: Synthetic primer
acgacttcatcaa

SEQ ID NO: 3731 - DNA, 13 bp, Artificial Sequence
  Description of Artificial Sequence: Synthetic primer
tgaaaaggcagag

SEQ ID NO: 3732 - DNA, 13 bp, Artificial Sequence
  Description of Artificial Sequence: Synthetic primer
gtatggggattag

SEQ ID NO: 3733 - DNA, 13 bp, Artificial Sequence
  Description of Artificial Sequence: Synthetic primer
acctggaagtaaa

SEQ ID NO: 3734 - DNA, 13 bp, Artificial Sequence
  Description of Artificial Sequence: Synthetic primer
ggctgctcagagg

SEQ ID NO: 3735 - DNA, 13 bp, Artificial Sequence
  Description of Artificial Sequence: Synthetic primer
tcgcttttaatac

SEQ ID NO: 3736 - DNA, 13 bp, Artificial Sequence
  Description of Artificial Sequence: Synthetic primer
gtcacctacgtgc

SEQ ID NO: 3737 - DNA, 13 bp, Artificial Sequence
  Description of Artificial Sequence: Synthetic primer
ctcgtcgcgttcc

SEQ ID NO: 3738 - DNA, 13 bp, Artificial Sequence
  Description of Artificial Sequence: Synthetic primer
cctctgcggcagt

SEQ ID NO: 3739 - DNA, 13 bp, Artificial Sequence
  Description of Artificial Sequence: Synthetic primer
aatcctatcttgg

SEQ ID NO: 3740 - DNA, 13 bp, Artificial Sequence
  Description of Artificial Sequence: Synthetic primer
tgatcgaggcgtt

SEQ ID NO: 3741 - DNA, 13 bp, Artificial Sequence
  Description of Artificial Sequence: Synthetic primer
atgaaaagtgcat

SEQ ID NO: 3742 - DNA, 13 bp, Artificial Sequence
  Description of Artificial Sequence: Synthetic primer
tgatcatattcat

SEQ ID NO: 3743 - DNA, 13 bp, Artificial Sequence
  Description of Artificial Sequence: Synthetic primer
gcaagcaaatgtg

SEQ ID NO: 3744 - DNA, 13 bp, Artificial Sequence
  Description of Artificial Sequence: Synthetic primer
ttaataccttgtt

SEQ ID NO: 3745 - DNA, 13 bp, Artificial Sequence
  Description of Artificial Sequence: Synthetic primer
ttatactatagcc

SEQ ID NO: 3746 - DNA, 13 bp, Artificial Sequence
  Description of Artificial Sequence: Synthetic primer
tcggtgtttaccg

SEQ ID NO: 3747 - DNA, 13 bp, Artificial Sequence
  Description of Artificial Sequence: Synthetic primer
gcgaaatgggaat

SEQ ID NO: 3748 - DNA, 13 bp, Artificial Sequence
  Description of Artificial Sequence: Synthetic primer
ttcccaacaaacg

SEQ ID NO: 3749 - DNA, 13 bp, Artificial Sequence
  Description of Artificial Sequence: Synthetic primer
ccctgctgctcag

SEQ ID NO: 3750 - DNA, 13 bp, Artificial Sequence
  Description of Artificial Sequence: Synthetic primer
ttatcgccgaacc

SEQ ID NO: 3751 - DNA, 13 bp, Artificial Sequence
  Description of Artificial Sequence: Synthetic primer
aaaagcaagtagg

SEQ ID NO: 3752 - DNA, 13 bp, Artificial Sequence
  Description of Artificial Sequence: Synthetic primer
ttcaggttcagaa

SEQ ID NO: 3753 - DNA, 13 bp, Artificial Sequence
  Description of Artificial Sequence: Synthetic primer
cattaaatgaagt

SEQ ID NO: 3754 - DNA, 13 bp, Artificial Sequence
  Description of Artificial Sequence: Synthetic primer
cttcgcctgggtg

SEQ ID NO: 3755 - DNA, 13 bp, Artificial Sequence
  Description of Artificial Sequence: Synthetic primer
ccagcataatatt

SEQ ID NO: 3756 - DNA, 13 bp, Artificial Sequence
  Description of Artificial Sequence: Synthetic primer
tggtggatgacgc

SEQ ID NO: 3757 - DNA, 13 bp, Artificial Sequence
  Description of Artificial Sequence: Synthetic primer
tcttacattaaac

SEQ ID NO: 3758 - DNA, 13 bp, Artificial Sequence
  Description of Artificial Sequence: Synthetic primer
aaattggacttcc

SEQ ID NO: 3759 - DNA, 13 bp, Artificial Sequence
  Description of Artificial Sequence: Synthetic primer
ttcgtgatcgatc

SEQ ID NO: 3760 - DNA, 13 bp, Artificial Sequence
  Description of Artificial Sequence: Synthetic primer
tcgtccaccacca

SEQ ID NO: 3761 - DNA, 13 bp, Artificial Sequence
  Description of Artificial Sequence: Synthetic primer
aaatcttcgacaa

SEQ ID NO: 3762 - DNA, 13 bp, Artificial Sequence
  Description of Artificial Sequence: Synthetic primer
aagcgcggcttct

SEQ ID NO: 3763 - DNA, 13 bp, Artificial Sequence
  Description of Artificial Sequence: Synthetic primer
acctgaccgcgct

SEQ ID NO: 3764 - DNA, 13 bp, Artificial Sequence
  Description of Artificial Sequence: Synthetic primer
tggtgccgttgtc

SEQ ID NO: 3765 - DNA, 13 bp, Artificial Sequence
  Description of Artificial Sequence: Synthetic primer
acattatccgctc

SEQ ID NO: 3766 - DNA, 13 bp, Artificial Sequence
  Description of Artificial Sequence: Synthetic primer
gaccagtccttga

SEQ ID NO: 3767 - DNA, 13 bp, Artificial Sequence
  Description of Artificial Sequence: Synthetic primer
atatggctctaat

SEQ ID NO: 3768 - DNA, 13 bp, Artificial Sequence
  Description of Artificial Sequence: Synthetic primer
acttctataagct

SEQ ID NO: 3769 - DNA, 13 bp, Artificial Sequence
  Description of Artificial Sequence: Synthetic primer
cagatcgtcatat

SEQ ID NO: 3770 - DNA, 13 bp, Artificial Sequence
  Description of Artificial Sequence: Synthetic primer
gaacaggccgatg

SEQ ID NO: 3771 - DNA, 13 bp, Artificial Sequence
  Description of Artificial Sequence: Synthetic primer
tagatgttcatgc

SEQ ID NO: 3772 - DNA, 13 bp, Artificial Sequence
  Description of Artificial Sequence: Synthetic primer
attcgcgagcaga

SEQ ID NO: 3773 - DNA, 13 bp, Artificial Sequence
  Description of Artificial Sequence: Synthetic primer
gggagtgaggtag

SEQ ID NO: 3774 - DNA, 13 bp, Artificial Sequence
  Description of Artificial Sequence: Synthetic primer
tggcgaagatgga

SEQ ID NO: 3775 - DNA, 13 bp, Artificial Sequence
  Description of Artificial Sequence: Synthetic primer
aagcgcatgagcg

SEQ ID NO: 3776 - DNA, 13 bp, Artificial Sequence
  Description of Artificial Sequence: Synthetic primer
gtacagcgaaagc

SEQ ID NO: 3777 - DNA, 13 bp, Artificial Sequence
  Description of Artificial Sequence: Synthetic primer
cgcacgaacgacg

SEQ ID NO: 3778 - DNA, 13 bp, Artificial Sequence
  Description of Artificial Sequence: Synthetic primer
cggcctgagcttc

SEQ ID NO: 3779 - DNA, 13 bp, Artificial Sequence
  Description of Artificial Sequence: Synthetic primer
caatacccatggt

SEQ ID NO: 3780 - DNA, 13 bp, Artificial Sequence
  Description of Artificial Sequence: Synthetic primer
ccatcgggatcag

SEQ ID NO: 3781 - DNA, 13 bp, Artificial Sequence
  Description of Artificial Sequence: Synthetic primer
catgtgccgctca

SEQ ID NO: 3782 - DNA, 13 bp, Artificial Sequence
  Description of Artificial Sequence: Synthetic primer
gacgatgccattg

SEQ ID NO: 3783 - DNA, 13 bp, Artificial Sequence
  Description of Artificial Sequence: Synthetic primer
gcgcacagcacca

SEQ ID NO: 3784 - DNA, 13 bp, Artificial Sequence
  Description of Artificial Sequence: Synthetic primer
tgccgctgttcct

SEQ ID NO: 3785 - DNA, 13 bp, Artificial Sequence
  Description of Artificial Sequence: Synthetic primer
ttgatctcgtcca

SEQ ID NO: 3786 - DNA, 13 bp, Artificial Sequence
  Description of Artificial Sequence: Synthetic primer
gtgctgcgcagaa

SEQ ID NO: 3787 - DNA, 13 bp, Artificial Sequence
  Description of Artificial Sequence: Synthetic primer
gtgtgatccgggt

SEQ ID NO: 3788 - DNA, 13 bp, Artificial Sequence
  Description of Artificial Sequence: Synthetic primer
gtcacttcaaaga

SEQ ID NO: 3789 - DNA, 13 bp, Artificial Sequence
  Description of Artificial Sequence: Synthetic primer
tcctgatcgatat

SEQ ID NO: 3790 - DNA, 13 bp, Artificial Sequence
  Description of Artificial Sequence: Synthetic primer
tcgtgccgatgag

SEQ ID NO: 3791 - DNA, 13 bp, Artificial Sequence
  Description of Artificial Sequence: Synthetic primer
aaaggtcaggaag

SEQ ID NO: 3792 - DNA, 13 bp, Artificial Sequence
  Description of Artificial Sequence: Synthetic primer
agaacgtccaggt

SEQ ID NO: 3793 - DNA, 13 bp, Artificial Sequence
  Description of Artificial Sequence: Synthetic primer
atttgcgcctgtt

SEQ ID NO: 3794 - DNA, 13 bp, Artificial Sequence
  Description of Artificial Sequence: Synthetic primer
tttcttatcgcgc

SEQ ID NO: 3795 - DNA, 13 bp, Artificial Sequence
  Description of Artificial Sequence: Synthetic primer
ttttaagtgcatg

SEQ ID NO: 3796 - DNA, 13 bp, Artificial Sequence
  Description of Artificial Sequence: Synthetic primer
ttactgacctgca

SEQ ID NO: 3797 - DNA, 13 bp, Artificial Sequence
  Description of Artificial Sequence: Synthetic primer
tggttttcctgct

SEQ ID NO: 3798 - DNA, 13 bp, Artificial Sequence
  Description of Artificial Sequence: Synthetic primer
gccagtagcgaga

SEQ ID NO: 3799 - DNA, 13 bp, Artificial Sequence
  Description of Artificial Sequence: Synthetic primer
ctggctggaggaa

SEQ ID NO: 3800 - DNA, 13 bp, Artificial Sequence
  Description of Artificial Sequence: Synthetic primer
aacggcgcattta

SEQ ID NO: 3801 - DNA, 13 bp, Artificial Sequence
  Description of Artificial Sequence: Synthetic primer
catttcgccaaac

SEQ ID NO: 3802 - DNA, 13 bp, Artificial Sequence
  Description of Artificial Sequence: Synthetic primer
gcagaacaaccag

SEQ ID NO: 3803 - DNA, 13 bp, Artificial Sequence
  Description of Artificial Sequence: Synthetic primer
tacaggcacagac

SEQ ID NO: 3804 - DNA, 13 bp, Artificial Sequence
  Description of Artificial Sequence: Synthetic primer
tcgtggcgtaaaa

SEQ ID NO: 3805 - DNA, 13 bp, Artificial Sequence
  Description of Artificial Sequence: Synthetic primer
atgcaacaacgac

SEQ ID NO: 3806 - DNA, 13 bp, Artificial Sequence
  Description of Artificial Sequence: Synthetic primer
tgctgctggactt

SEQ ID NO: 3807 - DNA, 13 bp, Artificial Sequence
  Description of Artificial Sequence: Synthetic primer
tcccgattgctga

SEQ ID NO: 3808 - DNA, 13 bp, Artificial Sequence
  Description of Artificial Sequence: Synthetic primer
ctattacagaaaa

SEQ ID NO: 3809 - DNA, 13 bp, Artificial Sequence
  Description of Artificial Sequence: Synthetic primer
tctaccgttccta

SEQ ID NO: 3810 - DNA, 13 bp, Artificial Sequence
  Description of Artificial Sequence: Synthetic primer
gacgtgcagaacc

SEQ ID NO: 3811 - DNA, 13 bp, Artificial Sequence
  Description of Artificial Sequence: Synthetic primer
acgatccggtgac

SEQ ID NO: 3812 - DNA, 13 bp, Artificial Sequence
  Description of Artificial Sequence: Synthetic primer
accatcgcgatac

SEQ ID NO: 3813 - DNA, 13 bp, Artificial Sequence
  Description of Artificial Sequence: Synthetic primer
gtaaagcggtcca

SEQ ID NO: 3814 - DNA, 13 bp, Artificial Sequence
  Description of Artificial Sequence: Synthetic primer
atcggcatcctgg

SEQ ID NO: 3815 - DNA, 13 bp, Artificial Sequence
  Description of Artificial Sequence: Synthetic primer
gccagatattttg

SEQ ID NO: 3816 - DNA, 13 bp, Artificial Sequence
  Description of Artificial Sequence: Synthetic primer
acaacaagatgga

SEQ ID NO: 3817 - DNA, 13 bp, Artificial Sequence
  Description of Artificial Sequence: Synthetic primer
ggaactcgttctg

SEQ ID NO: 3818 - DNA, 13 bp, Artificial Sequence
  Description of Artificial Sequence: Synthetic primer
ggcttgacagatg

SEQ ID NO: 3819 - DNA, 13 bp, Artificial Sequence
  Description of Artificial Sequence: Synthetic primer
actggcgatagat

SEQ ID NO: 3820 - DNA, 13 bp, Artificial Sequence
  Description of Artificial Sequence: Synthetic primer
attgttagctgac

SEQ ID NO: 3821 - DNA, 13 bp, Artificial Sequence
  Description of Artificial Sequence: Synthetic primer
tgaacacaaacca

SEQ ID NO: 3822 - DNA, 13 bp, Artificial Sequence
  Description of Artificial Sequence: Synthetic primer
agatctgcatcgt

SEQ ID NO: 3823 - DNA, 13 bp, Artificial Sequence
  Description of Artificial Sequence: Synthetic primer
ttgatctgggcat

SEQ ID NO: 3824 - DNA, 13 bp, Artificial Sequence
  Description of Artificial Sequence: Synthetic primer
cagggcttgagca

SEQ ID NO: 3825 - DNA, 13 bp, Artificial Sequence
  Description of Artificial Sequence: Synthetic primer
tttgtatctccaa

SEQ ID NO: 3826 - DNA, 13 bp, Artificial Sequence
  Description of Artificial Sequence: Synthetic primer
ggggctttgtagg

SEQ ID NO: 3827 - DNA, 13 bp, Artificial Sequence
  Description of Artificial Sequence: Synthetic primer
ccaaaacggaacg

SEQ ID NO: 3828 - DNA, 13 bp, Artificial Sequence
  Description of Artificial Sequence: Synthetic primer
ttatccgtgatta

SEQ ID NO: 3829 - DNA, 13 bp, Artificial Sequence
  Description of Artificial Sequence: Synthetic primer
tcagcgccggtct

SEQ ID NO: 3830 - DNA, 13 bp, Artificial Sequence
  Description of Artificial Sequence: Synthetic primer
agaaaagctgaaa

SEQ ID NO: 3831 - DNA, 13 bp, Artificial Sequence
  Description of Artificial Sequence: Synthetic primer
agcagttcggacg

SEQ ID NO: 3832 - DNA, 13 bp, Artificial Sequence
  Description of Artificial Sequence: Synthetic primer
tgctgctggcgat

SEQ ID NO: 3833 - DNA, 13 bp, Artificial Sequence
  Description of Artificial Sequence: Synthetic primer
caccgactaccgg

SEQ ID NO: 3834 - DNA, 13 bp, Artificial Sequence
  Description of Artificial Sequence: Synthetic primer
ttgatacgcttat

SEQ ID NO: 3835 - DNA, 13 bp, Artificial Sequence
  Description of Artificial Sequence: Synthetic primer
cgatcttcgcgag

SEQ ID NO: 3836 - DNA, 13 bp, Artificial Sequence
  Description of Artificial Sequence: Synthetic primer
tattctgcgccat

SEQ ID NO: 3837 - DNA, 13 bp, Artificial Sequence
  Description of Artificial Sequence: Synthetic primer
atggaggcggata

SEQ ID NO: 3838 - DNA, 13 bp, Artificial Sequence
  Description of Artificial Sequence: Synthetic primer
tatggctcagtgc

SEQ ID NO: 3839 - DNA, 13 bp, Artificial Sequence
  Description of Artificial Sequence: Synthetic primer
ttattaatgccgt

SEQ ID NO: 3840 - DNA, 13 bp, Artificial Sequence
  Description of Artificial Sequence: Synthetic primer
gtttactaggaat

SEQ ID NO: 3841 - DNA, 13 bp, Artificial Sequence
  Description of Artificial Sequence: Synthetic primer
ccagagaataaca

SEQ ID NO: 3842 - DNA, 13 bp, Artificial Sequence
  Description of Artificial Sequence: Synthetic primer
gtcctcgggcttg

SEQ ID NO: 3843 - DNA, 13 bp, Artificial Sequence
  Description of Artificial Sequence: Synthetic primer
atgagcgataaaa

SEQ ID NO: 3844 - DNA, 13 bp, Artificial Sequence
  Description of Artificial Sequence: Synthetic primer
taccgtgcgattg

SEQ ID NO: 3845 - DNA, 13 bp, Artificial Sequence
  Description of Artificial Sequence: Synthetic primer
gcacctcgatatg

SEQ ID NO: 3846 - DNA, 13 bp, Artificial Sequence
  Description of Artificial Sequence: Synthetic primer
gctgctctttgtt

SEQ ID NO: 3847 - DNA, 13 bp, Artificial Sequence
  Description of Artificial Sequence: Synthetic primer
gcagcggccatta

SEQ ID NO: 3848 - DNA, 13 bp, Artificial Sequence
  Description of Artificial Sequence: Synthetic primer
ccggcggtggtat

SEQ ID NO: 3849 - DNA, 13 bp, Artificial Sequence
  Description of Artificial Sequence: Synthetic primer
cagaaaatcctga

SEQ ID NO: 3850 - DNA, 13 bp, Artificial Sequence
  Description of Artificial Sequence: Synthetic primer
caggtgcagaata

SEQ ID NO: 3851 - DNA, 13 bp, Artificial Sequence
  Description of Artificial Sequence: Synthetic primer
gcgtcttgaaaac

SEQ ID NO: 3852 - DNA, 13 bp, Artificial Sequence
  Description of Artificial Sequence: Synthetic primer
tctatgccgttat

SEQ ID NO: 3853 - DNA, 13 bp, Artificial Sequence
  Description of Artificial Sequence: Synthetic primer
cgtcaccggaact

SEQ ID NO: 3854 - DNA, 13 bp, Artificial Sequence
  Description of Artificial Sequence: Synthetic primer
aagcgggtggaag

SEQ ID NO: 3855 - DNA, 13 bp, Artificial Sequence
  Description of Artificial Sequence: Synthetic primer
gccctgctgatcg

SEQ ID NO: 3856 - DNA, 13 bp, Artificial Sequence
  Description of Artificial Sequence: Synthetic primer
ggttaagcttatc

SEQ ID NO: 3857 - DNA, 13 bp, Artificial Sequence
  Description of Artificial Sequence: Synthetic primer
tatgtacttttgc

SEQ ID NO: 3858 - DNA, 13 bp, Artificial Sequence
  Description of Artificial Sequence: Synthetic primer
aacaattctgttc

SEQ ID NO: 3859 - DNA, 13 bp, Artificial Sequence
  Description of Artificial Sequence: Synthetic primer
ccgaaccttatct

SEQ ID NO: 3860 - DNA, 13 bp, Artificial Sequence
  Description of Artificial Sequence: Synthetic primer
aaatcaatcccct

SEQ ID NO: 3861 - DNA, 13 bp, Artificial Sequence
  Description of Artificial Sequence: Synthetic primer
catttattaggct

SEQ ID NO: 3862 - DNA, 13 bp, Artificial Sequence
  Description of Artificial Sequence: Synthetic primer
tacgcgagatgat

SEQ ID NO: 3863 - DNA, 13 bp, Artificial Sequence
  Description of Artificial Sequence: Synthetic primer
gaaacgtcttgct

SEQ ID NO: 3864 - DNA, 13 bp, Artificial Sequence
  Description of Artificial Sequence: Synthetic primer
ggtctgcttgagc

SEQ ID NO: 3865 - DNA, 13 bp, Artificial Sequence
  Description of Artificial Sequence: Synthetic primer
accagcacgacca

SEQ ID NO: 3866 - DNA, 13 bp, Artificial Sequence
  Description of Artificial Sequence: Synthetic primer
ctgacgataggtc

SEQ ID NO: 3867 - DNA, 13 bp, Artificial Sequence
  Description of Artificial Sequence: Synthetic primer
ctgaaataaacag

SEQ ID NO: 3868 - DNA, 13 bp, Artificial Sequence
  Description of Artificial Sequence: Synthetic primer
gatacattcgtcc

SEQ ID NO: 3869 - DNA, 13 bp, Artificial Sequence
  Description of Artificial Sequence: Synthetic primer
cttattgaggctt

SEQ ID NO: 3870 - DNA, 13 bp, Artificial Sequence
  Description of Artificial Sequence: Synthetic primer
tcgacgcgatcgc

SEQ ID NO: 3871 - DNA, 13 bp, Artificial Sequence
  Description of Artificial Sequence: Synthetic primer
agcctagggttgc

SEQ ID NO: 3872 - DNA, 13 bp, Artificial Sequence
  Description of Artificial Sequence: Synthetic primer
gcgtgttttcggc

SEQ ID NO: 3873 - DNA, 13 bp, Artificial Sequence
  Description of Artificial Sequence: Synthetic primer
gatttgttatctt

SEQ ID NO: 3874 - DNA, 13 bp, Artificial Sequence
  Description of Artificial Sequence: Synthetic primer
gaaattcttgcaa

SEQ ID NO: 3875 - DNA, 13 bp, Artificial Sequence
  Description of Artificial Sequence: Synthetic primer
gagcggcgcaata

SEQ ID NO: 3876 - DNA, 13 bp, Artificial Sequence
  Description of Artificial Sequence: Synthetic primer
cgttgccgtgctt

SEQ ID NO: 3877 - DNA, 13 bp, Artificial Sequence
  Description of Artificial Sequence: Synthetic primer
taccaatacgacc

SEQ ID NO: 3878 - DNA, 13 bp, Artificial Sequence
  Description of Artificial Sequence: Synthetic primer
acctaaatttatc

SEQ ID NO: 3879 - DNA, 13 bp, Artificial Sequence
  Description of Artificial Sequence: Synthetic primer
ctttccggccacc

SEQ ID NO: 3880 - DNA, 13 bp, Artificial Sequence
  Description of Artificial Sequence: Synthetic primer
ttttgctcgcccg

SEQ ID NO: 3881 - DNA, 13 bp, Artificial Sequence
  Description of Artificial Sequence: Synthetic primer
cagtactttaaaa

SEQ ID NO: 3882 - DNA, 13 bp, Artificial Sequence
  Description of Artificial Sequence: Synthetic primer
gcattgatgtact

SEQ ID NO: 3883 - DNA, 13 bp, Artificial Sequence
  Description of Artificial Sequence: Synthetic primer
aatttacgacaca

SEQ ID NO: 3884 - DNA, 13 bp, Artificial Sequence
  Description of Artificial Sequence: Synthetic primer
cgcagtggatggc

SEQ ID NO: 3885 - DNA, 13 bp, Artificial Sequence
  Description of Artificial Sequence: Synthetic primer
gcaccggcaatcg

SEQ ID NO: 3886 - DNA, 13 bp, Artificial Sequence
  Description of Artificial Sequence: Synthetic primer
tcgatgcacggct

SEQ ID NO: 3887 - DNA, 13 bp, Artificial Sequence
  Description of Artificial Sequence: Synthetic primer
cgtagatcagcag

SEQ ID NO: 3888 - DNA, 13 bp, Artificial Sequence
  Description of Artificial Sequence: Synthetic primer
tattagatgccat

SEQ ID NO: 3889 - DNA, 13 bp, Artificial Sequence
  Description of Artificial Sequence: Synthetic primer
cagcacaggcaag

SEQ ID NO: 3890 - DNA, 13 bp, Artificial Sequence
  Description of Artificial Sequence: Synthetic primer
atgagtggctaaa

SEQ ID NO: 3891 - DNA, 13 bp, Artificial Sequence
  Description of Artificial Sequence: Synthetic primer
ttggccagcagtt

SEQ ID NO: 3892 - DNA, 13 bp, Artificial Sequence
  Description of Artificial Sequence: Synthetic primer
gccaggatttctc

SEQ ID NO: 3893 - DNA, 13 bp, Artificial Sequence
  Description of Artificial Sequence: Synthetic primer
ccggtattaccct

SEQ ID NO: 3894 - DNA, 13 bp, Artificial Sequence
  Description of Artificial Sequence: Synthetic primer
tcaatattggaat

SEQ ID NO: 3895 - DNA, 13 bp, Artificial Sequence
  Description of Artificial Sequence: Synthetic primer
cgacctgacccag

SEQ ID NO: 3896 - DNA, 13 bp, Artificial Sequence
  Description of Artificial Sequence: Synthetic primer
caaaaggatacgt

SEQ ID NO: 3897 - DNA, 13 bp, Artificial Sequence
  Description of Artificial Sequence: Synthetic primer
caatgagtgtcat

SEQ ID NO: 3898 - DNA, 13 bp, Artificial Sequence
  Description of Artificial Sequence: Synthetic primer
tgtgggttgtcgc

SEQ ID NO: 3899 - DNA, 13 bp, Artificial Sequence
  Description of Artificial Sequence: Synthetic primer
ctagtatcccaag

SEQ ID NO: 3900 - DNA, 13 bp, Artificial Sequence
  Description of Artificial Sequence: Synthetic primer
gccgcgtttctcg

SEQ ID NO: 3901 - DNA, 13 bp, Artificial Sequence
  Description of Artificial Sequence: Synthetic primer
gagaacatagcgt

SEQ ID NO: 3902 - DNA, 13 bp, Artificial Sequence
  Description of Artificial Sequence: Synthetic primer
tggcagattggtt

SEQ ID NO: 3903 - DNA, 13 bp, Artificial Sequence
  Description of Artificial Sequence: Synthetic primer
catggagaacgac

SEQ ID NO: 3904 - DNA, 13 bp, Artificial Sequence
  Description of Artificial Sequence: Synthetic primer
caatgtatgtaaa

SEQ ID NO: 3905 - DNA, 13 bp, Artificial Sequence
  Description of Artificial Sequence: Synthetic primer
ctcgtcaagcagg

SEQ ID NO: 3906 - DNA, 13 bp, Artificial Sequence
  Description of Artificial Sequence: Synthetic primer
atcaacggcgcaa

SEQ ID NO: 3907 - DNA, 13 bp, Artificial Sequence
  Description of Artificial Sequence: Synthetic primer
tgtcgaggatgat

SEQ ID NO: 3908 - DNA, 13 bp, Artificial Sequence
  Description of Artificial Sequence: Synthetic primer
taccggtgcgact

SEQ ID NO: 3909 - DNA, 13 bp, Artificial Sequence
  Description of Artificial Sequence: Synthetic primer
ttaggttgggatc

SEQ ID NO: 3910 - DNA, 13 bp, Artificial Sequence
  Description of Artificial Sequence: Synthetic primer
tcgcccttcttca

SEQ ID NO: 3911 - DNA, 13 bp, Artificial Sequence
  Description of Artificial Sequence: Synthetic primer
ctttgatgattgt

SEQ ID NO: 3912 - DNA, 13 bp, Artificial Sequence
  Description of Artificial Sequence: Synthetic primer
ggcaaaattaatc

SEQ ID NO: 3913 - DNA, 13 bp, Artificial Sequence
  Description of Artificial Sequence: Synthetic primer
tcagtgaggcacc

SEQ ID NO: 3914 - DNA, 13 bp, Artificial Sequence
  Description of Artificial Sequence: Synthetic primer
tttcctcagccgt

SEQ ID NO: 3915 - DNA, 13 bp, Artificial Sequence
  Description of Artificial Sequence: Synthetic primer
tcgatatcaaagt

SEQ ID NO: 3916 - DNA, 13 bp, Artificial Sequence
  Description of Artificial Sequence: Synthetic primer
agtactcaccagt

SEQ ID NO: 3917 - DNA, 13 bp, Artificial Sequence
  Description of Artificial Sequence: Synthetic primer
tctttatagatcg

SEQ ID NO: 3918 - DNA, 13 bp, Artificial Sequence
  Description of Artificial Sequence: Synthetic primer
gatcaggccgatc

SEQ ID NO: 3919 - DNA, 13 bp, Artificial Sequence
  Description of Artificial Sequence: Synthetic primer
tgaaaatgaggat

SEQ ID NO: 3920 - DNA, 13 bp, Artificial Sequence
  Description of Artificial Sequence: Synthetic primer
cagtcgtacgttg

SEQ ID NO: 3921 - DNA, 13 bp, Artificial Sequence
  Description of Artificial Sequence: Synthetic primer
aaggaccgcttct

SEQ ID NO: 3922 - DNA, 13 bp, Artificial Sequence
  Description of Artificial Sequence: Synthetic primer
cgatagatggcaa

SEQ ID NO: 3923 - DNA, 13 bp, Artificial Sequence
  Description of Artificial Sequence: Synthetic primer
gtttactaaacgg

SEQ ID NO: 3924 - DNA, 13 bp, Artificial Sequence
  Description of Artificial Sequence: Synthetic primer
tccgatcagatgc

SEQ ID NO: 3925 - DNA, 13 bp, Artificial Sequence
  Description of Artificial Sequence: Synthetic primer
gtagccctcaagt

SEQ ID NO: 3926 - DNA, 13 bp, Artificial Sequence
  Description of Artificial Sequence: Synthetic primer
tttgccgaactct

SEQ ID NO: 3927 - DNA, 13 bp, Artificial Sequence
  Description of Artificial Sequence: Synthetic primer
agcaactggtgca

SEQ ID NO: 3928 - DNA, 13 bp, Artificial Sequence
  Description of Artificial Sequence: Synthetic primer
aaaccgagagaaa

SEQ ID NO: 3929 - DNA, 13 bp, Artificial Sequence
  Description of Artificial Sequence: Synthetic primer
tatgacccgaatg

SEQ ID NO: 3930 - DNA, 13 bp, Artificial Sequence
  Description of Artificial Sequence: Synthetic primer
caaaatggcatgg

SEQ ID NO: 3931 - DNA, 13 bp, Artificial Sequence
  Description of Artificial Sequence: Synthetic primer
attattccaaact

SEQ ID NO: 3932 - DNA, 13 bp, Artificial Sequence
  Description of Artificial Sequence: Synthetic primer
acatcagccgcgg

SEQ ID NO: 3933 - DNA, 13 bp, Artificial Sequence
  Description of Artificial Sequence: Synthetic primer
cgatcgcagcttc

SEQ ID NO: 3934 - DNA, 13 bp, Artificial Sequence
  Description of Artificial Sequence: Synthetic primer
tgggattggtatt

SEQ ID NO: 3935 - DNA, 13 bp, Artificial Sequence
  Description of Artificial Sequence: Synthetic primer
ctatgcgctttaa

SEQ ID NO: 3936 - DNA, 13 bp, Artificial Sequence
  Description of Artificial Sequence: Synthetic primer
atttaggtgtggg

SEQ ID NO: 3937 - DNA, 13 bp, Artificial Sequence
  Description of Artificial Sequence: Synthetic primer
tggccggcatcac

SEQ ID NO: 3938 - DNA, 13 bp, Artificial Sequence
  Description of Artificial Sequence: Synthetic primer
cagaataaaggcg

SEQ ID NO: 3939 - DNA, 13 bp, Artificial Sequence
  Description of Artificial Sequence: Synthetic primer
cttctacctgcag

SEQ ID NO: 3940 - DNA, 13 bp, Artificial Sequence
  Description of Artificial Sequence: Synthetic primer
ttttcacgaacgg

SEQ ID NO: 3941 - DNA, 13 bp, Artificial Sequence
  Description of Artificial Sequence: Synthetic primer
tgcgccatcacgc

SEQ ID NO: 3942 - DNA, 13 bp, Artificial Sequence
  Description of Artificial Sequence: Synthetic primer
acgttgggatgac

SEQ ID NO: 3943 - DNA, 13 bp, Artificial Sequence
  Description of Artificial Sequence: Synthetic primer
tctccctgttagc

SEQ ID NO: 3944 - DNA, 13 bp, Artificial Sequence
  Description of Artificial Sequence: Synthetic primer
ctgaaaacagcca

SEQ ID NO: 3945 - DNA, 13 bp, Artificial Sequence
  Description of Artificial Sequence: Synthetic primer
atgtggcctcaca

SEQ ID NO: 3946 - DNA, 13 bp, Artificial Sequence
  Description of Artificial Sequence: Synthetic primer
cgccagcacggta

SEQ ID NO: 3947 - DNA, 13 bp, Artificial Sequence
  Description of Artificial Sequence: Synthetic primer
acttcagcatggt

SEQ ID NO: 3948 - DNA, 13 bp, Artificial Sequence
  Description of Artificial Sequence: Synthetic primer
aaagaagatggta

SEQ ID NO: 3949 - DNA, 13 bp, Artificial Sequence
  Description of Artificial Sequence: Synthetic primer
gatttcatcattt

SEQ ID NO: 3950 - DNA, 13 bp, Artificial Sequence
  Description of Artificial Sequence: Synthetic primer
ttgcgagggtaaa

SEQ ID NO: 3951 - DNA, 13 bp, Artificial Sequence
  Description of Artificial Sequence: Synthetic primer
cgggcttgtcgaa

SEQ ID NO: 3952 - DNA, 13 bp, Artificial Sequence
  Description of Artificial Sequence: Synthetic primer
accgacgtggtca

SEQ ID NO: 3953 - DNA, 13 bp, Artificial Sequence
  Description of Artificial Sequence: Synthetic primer
accggagctgtag

SEQ ID NO: 3954 - DNA, 13 bp, Artificial Sequence
  Description of Artificial Sequence: Synthetic primer
ggaaggataatct

SEQ ID NO: 3955 - DNA, 13 bp, Artificial Sequence
  Description of Artificial Sequence: Synthetic primer
cgctggatgcgca

SEQ ID NO: 3956 - DNA, 13 bp, Artificial Sequence
  Description of Artificial Sequence: Synthetic primer
gtattgcgccatg

SEQ ID NO: 3957 - DNA, 13 bp, Artificial Sequence
  Description of Artificial Sequence: Synthetic primer
ctctcgctggatt

SEQ ID NO: 3958 - DNA, 13 bp, Artificial Sequence
  Description of Artificial Sequence: Synthetic primer
atcgcctgcacct

SEQ ID NO: 3959 - DNA, 13 bp, Artificial Sequence
  Description of Artificial Sequence: Synthetic primer
tccgcatttatct

SEQ ID NO: 3960 - DNA, 13 bp, Artificial Sequence
  Description of Artificial Sequence: Synthetic primer
aagtatcatgtgg

SEQ ID NO: 3961 - DNA, 13 bp, Artificial Sequence
  Description of Artificial Sequence: Synthetic primer
accgcttgcggct

SEQ ID NO: 3962 - DNA, 13 bp, Artificial Sequence
  Description of Artificial Sequence: Synthetic primer
acgatacgtcata

SEQ ID NO: 3963 - DNA, 13 bp, Artificial Sequence
  Description of Artificial Sequence: Synthetic primer
ttatcacacatca

SEQ ID NO: 3964 - DNA, 13 bp, Artificial Sequence
  Description of Artificial Sequence: Synthetic primer
tacatcgaactgg

SEQ ID NO: 3965 - DNA, 13 bp, Artificial Sequence
  Description of Artificial Sequence: Synthetic primer
ctgaatttgctta

SEQ ID NO: 3966 - DNA, 13 bp, Artificial Sequence
  Description of Artificial Sequence: Synthetic primer
tgcccttcaccgc

SEQ ID NO: 3967 - DNA, 13 bp, Artificial Sequence
  Description of Artificial Sequence: Synthetic primer
tcctgttcaggaa

SEQ ID NO: 3968 - DNA, 13 bp, Artificial Sequence
  Description of Artificial Sequence: Synthetic primer
gatcacgaaaggg

SEQ ID NO: 3969 - DNA, 13 bp, Artificial Sequence
  Description of Artificial Sequence: Synthetic primer
atgctggcgcacg

SEQ ID NO: 3970 - DNA, 13 bp, Artificial Sequence
  Description of Artificial Sequence: Synthetic primer
ttaagaaatccaa

SEQ ID NO: 3971 - DNA, 13 bp, Artificial Sequence
  Description of Artificial Sequence: Synthetic primer
agtatatcgcagg

SEQ ID NO: 3972 - DNA, 13 bp, Artificial Sequence
  Description of Artificial Sequence: Synthetic primer
atcggcttcggcg

SEQ ID NO: 3973 - DNA, 13 bp, Artificial Sequence
  Description of Artificial Sequence: Synthetic primer
agctatccttccg

SEQ ID NO: 3974 - DNA, 13 bp, Artificial Sequence
  Description of Artificial Sequence: Synthetic primer
atcacttgggatg

SEQ ID NO: 3975 - DNA, 13 bp, Artificial Sequence
  Description of Artificial Sequence: Synthetic primer
actcgctcgcgat

SEQ ID NO: 3976 - DNA, 13 bp, Artificial Sequence
  Description of Artificial Sequence: Synthetic primer
catttccgccatg

SEQ ID NO: 3977 - DNA, 13 bp, Artificial Sequence
  Description of Artificial Sequence: Synthetic primer
acgttcagaccaa

SEQ ID NO: 3978 - DNA, 13 bp, Artificial Sequence
  Description of Artificial Sequence: Synthetic primer
cgaacagaccgat

SEQ ID NO: 3979 - DNA, 13 bp, Artificial Sequence
  Description of Artificial Sequence: Synthetic primer
aaaccggctaatg

SEQ ID NO: 3980 - DNA, 13 bp, Artificial Sequence
  Description of Artificial Sequence: Synthetic primer
tgatctcgccttt

SEQ ID NO: 3981 - DNA, 13 bp, Artificial Sequence
  Description of Artificial Sequence: Synthetic primer
cgaccgcctgttc

SEQ ID NO: 3982 - DNA, 13 bp, Artificial Sequence
  Description of Artificial Sequence: Synthetic primer
atgattggcttaa

SEQ ID NO: 3983 - DNA, 13 bp, Artificial Sequence
  Description of Artificial Sequence: Synthetic primer
aaagatggcaaag

SEQ ID NO: 3984 - DNA, 13 bp, Artificial Sequence
  Description of Artificial Sequence: Synthetic primer
agcgcctgggtct

SEQ ID NO: 3985 - DNA, 13 bp, Artificial Sequence
  Description of Artificial Sequence: Synthetic primer
tcatcatgccggt

SEQ ID NO: 3986 - DNA, 13 bp, Artificial Sequence
  Description of Artificial Sequence: Synthetic primer
tttcttcggcgcc

SEQ ID NO: 3987 - DNA, 13 bp, Artificial Sequence
  Description of Artificial Sequence: Synthetic primer
ataacttgcacaa

SEQ ID NO: 3988 - DNA, 13 bp, Artificial Sequence
  Description of Artificial Sequence: Synthetic primer
caggttacggaca

SEQ ID NO: 3989 - DNA, 13 bp, Artificial Sequence
  Description of Artificial Sequence: Synthetic primer
tcccgatggggag

SEQ ID NO: 3990 - DNA, 13 bp, Artificial Sequence
  Description of Artificial Sequence: Synthetic primer
gctggaagctcta

SEQ ID NO: 3991 - DNA, 13 bp, Artificial Sequence
  Description of Artificial Sequence: Synthetic primer
gcgccaaaggcga

SEQ ID NO: 3992 - DNA, 13 bp, Artificial Sequence
  Description of Artificial Sequence: Synthetic primer
gctgtatgcggag

SEQ ID NO: 3993 - DNA, 13 bp, Artificial Sequence
  Description of Artificial Sequence: Synthetic primer
ccttattttaccc

SEQ ID NO: 3994 - DNA, 13 bp, Artificial Sequence
  Description of Artificial Sequence: Synthetic primer
tggtttgttctga

SEQ ID NO: 3995 - DNA, 13 bp, Artificial Sequence
  Description of Artificial Sequence: Synthetic primer
ccgccgtagacca

SEQ ID NO: 3996 - DNA, 13 bp, Artificial Sequence
  Description of Artificial Sequence: Synthetic primer
ttgccagagtgaa

SEQ ID NO: 3997 - DNA, 13 bp, Artificial Sequence
  Description of Artificial Sequence: Synthetic primer
ggtaaacagcgtg

SEQ ID NO: 3998 - DNA, 13 bp, Artificial Sequence
  Description of Artificial Sequence: Synthetic primer
gcattattcagtt

SEQ ID NO: 3999 - DNA, 13 bp, Artificial Sequence
  Description of Artificial Sequence: Synthetic primer
cgctgcgcgtatt

SEQ ID NO: 4000 - DNA, 13 bp, Artificial Sequence
  Description of Artificial Sequence: Synthetic primer
agatggaggtgct

SEQ ID NO: 4001 - DNA, 13 bp, Artificial Sequence
  Description of Artificial Sequence: Synthetic primer
ggcctgaattgac

SEQ ID NO: 4002 - DNA, 13 bp, Artificial Sequence
  Description of Artificial Sequence: Synthetic primer
ccttgtatgatcc

SEQ ID NO: 4003 - DNA, 13 bp, Artificial Sequence
  Description of Artificial Sequence: Synthetic primer
atgaccgatcgtt

SEQ ID NO: 4004 - DNA, 13 bp, Artificial Sequence
  Description of Artificial Sequence: Synthetic primer
gtagttttgccct

SEQ ID NO: 4005 - DNA, 13 bp, Artificial Sequence
  Description of Artificial Sequence: Synthetic primer
acaataaagcggt

SEQ ID NO: 4006 - DNA, 13 bp, Artificial Sequence
  Description of Artificial Sequence: Synthetic primer
ccgaaaccggcca

SEQ ID NO: 4007 - DNA, 13 bp, Artificial Sequence
  Description of Artificial Sequence: Synthetic primer
tccggcatccagc

SEQ ID NO: 4008 - DNA, 13 bp, Artificial Sequence
  Description of Artificial Sequence: Synthetic primer
tgaatgccaaggc

SEQ ID NO: 4009 - DNA, 13 bp, Artificial Sequence
  Description of Artificial Sequence: Synthetic primer
aactgcatcgcta

SEQ ID NO: 4010 - DNA, 13 bp, Artificial Sequence
  Description of Artificial Sequence: Synthetic primer
ggcttgcgcttga

SEQ ID NO: 4011 - DNA, 13 bp, Artificial Sequence
  Description of Artificial Sequence: Synthetic primer
ctgaacatatggc

SEQ ID NO: 4012 - DNA, 13 bp, Artificial Sequence
  Description of Artificial Sequence: Synthetic primer
atttctcacgcca

SEQ ID NO: 4013 - DNA, 13 bp, Artificial Sequence
  Description of Artificial Sequence: Synthetic primer
catcggcattacc

SEQ ID NO: 4014 - DNA, 13 bp, Artificial Sequence
  Description of Artificial Sequence: Synthetic primer
cagatgctacgtg

SEQ ID NO: 4015 - DNA, 13 bp, Artificial Sequence
  Description of Artificial Sequence: Synthetic primer
atgtcggagctgg

SEQ ID NO: 4016 - DNA, 13 bp, Artificial Sequence
  Description of Artificial Sequence: Synthetic primer
ttgtgaacattgt

SEQ ID NO: 4017 - DNA, 13 bp, Artificial Sequence
  Description of Artificial Sequence: Synthetic primer
tttgctcttgaag

SEQ ID NO: 4018 - DNA, 13 bp, Artificial Sequence
  Description of Artificial Sequence: Synthetic primer
actggctgacgcg

SEQ ID NO: 4019 - DNA, 13 bp, Artificial Sequence
  Description of Artificial Sequence: Synthetic primer
tatttgctattac

SEQ ID NO: 4020 - DNA, 13 bp, Artificial Sequence
  Description of Artificial Sequence: Synthetic primer
atgcactcgctgc

SEQ ID NO: 4021 - DNA, 13 bp, Artificial Sequence
  Description of Artificial Sequence: Synthetic primer
cgaagggcgttgt

SEQ ID NO: 4022 - DNA, 13 bp, Artificial Sequence
  Description of Artificial Sequence: Synthetic primer
aaaggttttcatt

SEQ ID NO: 4023 - DNA, 13 bp, Artificial Sequence
  Description of Artificial Sequence: Synthetic primer
ataccgcgcaggt

SEQ ID NO: 4024 - DNA, 13 bp, Artificial Sequence
  Description of Artificial Sequence: Synthetic primer
tgttccatgaata

SEQ ID NO: 4025 - DNA, 13 bp, Artificial Sequence
  Description of Artificial Sequence: Synthetic primer
cggtaaatcgcaa

SEQ ID NO: 4026 - DNA, 13 bp, Artificial Sequence
  Description of Artificial Sequence: Synthetic primer
tgttcatcaccga

SEQ ID NO: 4027 - DNA, 13 bp, Artificial Sequence
  Description of Artificial Sequence: Synthetic primer
gggtgtggtcggt

SEQ ID NO: 4028 - DNA, 13 bp, Artificial Sequence
  Description of Artificial Sequence: Synthetic primer
gtcccttcaaagg

SEQ ID NO: 4029 - DNA, 13 bp, Artificial Sequence
  Description of Artificial Sequence: Synthetic primer
tgaaaacggctga

SEQ ID NO: 4030 - DNA, 13 bp, Artificial Sequence
  Description of Artificial Sequence: Synthetic primer
cggggatccacat

SEQ ID NO: 4031 - DNA, 13 bp, Artificial Sequence
  Description of Artificial Sequence: Synthetic primer
ctgaggatggcgt

SEQ ID NO: 4032 - DNA, 13 bp, Artificial Sequence
  Description of Artificial Sequence: Synthetic primer
caaaggccatcgg

SEQ ID NO: 4033 - DNA, 13 bp, Artificial Sequence
  Description of Artificial Sequence: Synthetic primer
cggtttctcttcc

SEQ ID NO: 4034 - DNA, 13 bp, Artificial Sequence
  Description of Artificial Sequence: Synthetic primer
atcggcctgaact

SEQ ID NO: 4035 - DNA, 13 bp, Artificial Sequence
  Description of Artificial Sequence: Synthetic primer
gaggaagttgtac

SEQ ID NO: 4036 - DNA, 13 bp, Artificial Sequence
  Description of Artificial Sequence: Synthetic primer
tgaaagtatcatt

SEQ ID NO: 4037 - DNA, 13 bp, Artificial Sequence
  Description of Artificial Sequence: Synthetic primer
ctgactaaactgc

SEQ ID NO: 4038 - DNA, 13 bp, Artificial Sequence
  Description of Artificial Sequence: Synthetic primer
ttataaaagctgt

SEQ ID NO: 4039 - DNA, 13 bp, Artificial Sequence
  Description of Artificial Sequence: Synthetic primer
accacacctatgt

SEQ ID NO: 4040 - DNA, 13 bp, Artificial Sequence
  Description of Artificial Sequence: Synthetic primer
atcaagtcagcca

SEQ ID NO: 4041 - DNA, 13 bp, Artificial Sequence
  Description of Artificial Sequence: Synthetic primer
cgcctgcgctttt

SEQ ID NO: 4042 - DNA, 13 bp, Artificial Sequence
  Description of Artificial Sequence: Synthetic primer
cgaaagcccaggc

SEQ ID NO: 4043 - DNA, 13 bp, Artificial Sequence
  Description of Artificial Sequence: Synthetic primer
gaacaagaggaaa

SEQ ID NO: 4044 - DNA, 13 bp, Artificial Sequence
  Description of Artificial Sequence: Synthetic primer
atcagtcacgcgt

SEQ ID NO: 4045 - DNA, 13 bp, Artificial Sequence
  Description of Artificial Sequence: Synthetic primer
ctggtgagcatgg

SEQ ID NO: 4046 - DNA, 13 bp, Artificial Sequence
  Description of Artificial Sequence: Synthetic primer
gaagcccagctgc

SEQ ID NO: 4047 - DNA, 13 bp, Artificial Sequence
  Description of Artificial Sequence: Synthetic primer
ttctcgcggtcga

SEQ ID NO: 4048 - DNA, 13 bp, Artificial Sequence
  Description of Artificial Sequence: Synthetic primer
tgatcgagcgcgc

SEQ ID NO: 4049 - DNA, 13 bp, Artificial Sequence
  Description of Artificial Sequence: Synthetic primer
acggcggacaaca

SEQ ID NO: 4050 - DNA, 13 bp, Artificial Sequence
  Description of Artificial Sequence: Synthetic primer
cttcaatgcctgt

SEQ ID NO: 4051 - DNA, 13 bp, Artificial Sequence
  Description of Artificial Sequence: Synthetic primer
aacagatccctgt

SEQ ID NO: 4052 - DNA, 13 bp, Artificial Sequence
  Description of Artificial Sequence: Synthetic primer
tcacgctcgtcgt

SEQ ID NO: 4053 - DNA, 13 bp, Artificial Sequence
  Description of Artificial Sequence: Synthetic primer
aaacattagacga

SEQ ID NO: 4054 - DNA, 13 bp, Artificial Sequence
  Description of Artificial Sequence: Synthetic primer
agcgcctggacga

SEQ ID NO: 4055 - DNA, 13 bp, Artificial Sequence
  Description of Artificial Sequence: Synthetic primer
cagtacaacttcc

SEQ ID NO: 4056 - DNA, 13 bp, Artificial Sequence
  Description of Artificial Sequence: Synthetic primer
tttgctgccgctg

SEQ ID NO: 4057 - DNA, 13 bp, Artificial Sequence
  Description of Artificial Sequence: Synthetic primer
ggcatcgccagca

SEQ ID NO: 4058 - DNA, 13 bp, Artificial Sequence
  Description of Artificial Sequence: Synthetic primer
tgaagccgttgat

SEQ ID NO: 4059 - DNA, 13 bp, Artificial Sequence
  Description of Artificial Sequence: Synthetic primer
gtacaagcacaaa

SEQ ID NO: 4060 - DNA, 13 bp, Artificial Sequence
  Description of Artificial Sequence: Synthetic primer
gaaaagagtattt

SEQ ID NO: 4061 - DNA, 13 bp, Artificial Sequence
  Description of Artificial Sequence: Synthetic primer
tactgggtgatgt

SEQ ID NO: 4062 - DNA, 13 bp, Artificial Sequence
  Description of Artificial Sequence: Synthetic primer
tgtcgttctgtcc

SEQ ID NO: 4063 - DNA, 13 bp, Artificial Sequence
  Description of Artificial Sequence: Synthetic primer
attcttgcggcta

SEQ ID NO: 4064 - DNA, 13 bp, Artificial Sequence
  Description of Artificial Sequence: Synthetic primer
aatccttgcgcgc

SEQ ID NO: 4065 - DNA, 13 bp, Artificial Sequence
  Description of Artificial Sequence: Synthetic primer
cgatgggcatcat

SEQ ID NO: 4066 - DNA, 13 bp, Artificial Sequence
  Description of Artificial Sequence: Synthetic primer
atggcgtaatcgg

SEQ ID NO: 4067 - DNA, 13 bp, Artificial Sequence
  Description of Artificial Sequence: Synthetic primer
ataattcccatat

SEQ ID NO: 4068 - DNA, 13 bp, Artificial Sequence
  Description of Artificial Sequence: Synthetic primer
tggccgaactcaa

SEQ ID NO: 4069 - DNA, 13 bp, Artificial Sequence
  Description of Artificial Sequence: Synthetic primer
agcaaaagtacat

SEQ ID NO: 4070 - DNA, 13 bp, Artificial Sequence
  Description of Artificial Sequence: Synthetic primer
aatcctttagaag

SEQ ID NO: 4071 - DNA, 13 bp, Artificial Sequence
  Description of Artificial Sequence: Synthetic primer
tgcgccgcacttc

SEQ ID NO: 4072 - DNA, 13 bp, Artificial Sequence
  Description of Artificial Sequence: Synthetic primer
ggcggtggatgtt

SEQ ID NO: 4073 - DNA, 13 bp, Artificial Sequence
  Description of Artificial Sequence: Synthetic primer
tggttggcgtgcg

SEQ ID NO: 4074 - DNA, 13 bp, Artificial Sequence
  Description of Artificial Sequence: Synthetic primer
acgatcggcccag

SEQ ID NO: 4075 - DNA, 13 bp, Artificial Sequence
  Description of Artificial Sequence: Synthetic primer
agtcgtgccgcat

SEQ ID NO: 4076 - DNA, 13 bp, Artificial Sequence
  Description of Artificial Sequence: Synthetic primer
gtcattggcaatg

SEQ ID NO: 4077 - DNA, 13 bp, Artificial Sequence
  Description of Artificial Sequence: Synthetic primer
ttggaataaacgc

SEQ ID NO: 4078 - DNA, 13 bp, Artificial Sequence
  Description of Artificial Sequence: Synthetic primer
tagaaagccatac

SEQ ID NO: 4079 - DNA, 13 bp, Artificial Sequence
  Description of Artificial Sequence: Synthetic primer
gcgaccgaaattg

SEQ ID NO: 4080 - DNA, 13 bp, Artificial Sequence
  Description of Artificial Sequence: Synthetic primer
ggtactttgcagg

SEQ ID NO: 4081 - DNA, 13 bp, Artificial Sequence
  Description of Artificial Sequence: Synthetic primer
tgtggaacgccgg

SEQ ID NO: 4082 - DNA, 13 bp, Artificial Sequence
  Description of Artificial Sequence: Synthetic primer
acgtactgaccct

SEQ ID NO: 4083 - DNA, 13 bp, Artificial Sequence
  Description of Artificial Sequence: Synthetic primer
cgctgttgctgtt

SEQ ID NO: 4084 - DNA, 13 bp, Artificial Sequence
  Description of Artificial Sequence: Synthetic primer
caccacgtctgga

SEQ ID NO: 4085 - DNA, 13 bp, Artificial Sequence
  Description of Artificial Sequence: Synthetic primer
catcagcgcctgc

SEQ ID NO: 4086 - DNA, 13 bp, Artificial Sequence
  Description of Artificial Sequence: Synthetic primer
gcttgtggtggca

SEQ ID NO: 4087 - DNA, 13 bp, Artificial Sequence
  Description of Artificial Sequence: Synthetic primer
cgctcgacgttct

SEQ ID NO: 4088 - DNA, 13 bp, Artificial Sequence
  Description of Artificial Sequence: Synthetic primer
cttcttcagtcag

SEQ ID NO: 4089 - DNA, 13 bp, Artificial Sequence
  Description of Artificial Sequence: Synthetic primer
tacagaacaacca

SEQ ID NO: 4090 - DNA, 13 bp, Artificial Sequence
  Description of Artificial Sequence: Synthetic primer
ttgaaaccgttga

SEQ ID NO: 4091 - DNA, 13 bp, Artificial Sequence
  Description of Artificial Sequence: Synthetic primer
tgtctgaaacctc

SEQ ID NO: 4092 - DNA, 13 bp, Artificial Sequence
  Description of Artificial Sequence: Synthetic primer
atttattcaagga

SEQ ID NO: 4093 - DNA, 13 bp, Artificial Sequence
  Description of Artificial Sequence: Synthetic primer
ctattgctaatga

SEQ ID NO: 4094 - DNA, 13 bp, Artificial Sequence
  Description of Artificial Sequence: Synthetic primer
gtcagctcctgct

SEQ ID NO: 4095 - DNA, 13 bp, Artificial Sequence
  Description of Artificial Sequence: Synthetic primer
ataaagataatgg

SEQ ID NO: 4096 - DNA, 13 bp, Artificial Sequence
  Description of Artificial Sequence: Synthetic primer
acataccatcagt

SEQ ID NO: 4097 - DNA, 13 bp, Artificial Sequence
  Description of Artificial Sequence: Synthetic primer
acggcagcgcaaa

SEQ ID NO: 4098 - DNA, 13 bp, Artificial Sequence
  Description of Artificial Sequence: Synthetic primer
tccagaaaatcca

SEQ ID NO: 4099 - DNA, 13 bp, Artificial Sequence
  Description of Artificial Sequence: Synthetic primer
atctttggtaaat

SEQ ID NO: 4100 - DNA, 13 bp, Artificial Sequence
  Description of Artificial Sequence: Synthetic primer
cgtttcataaaga

SEQ ID NO: 4101 - DNA, 13 bp, Artificial Sequence
  Description of Artificial Sequence: Synthetic primer
catgaccaggcac

SEQ ID NO: 4102 - DNA, 13 bp, Artificial Sequence
  Description of Artificial Sequence: Synthetic primer
caaaatatctggc

SEQ ID NO: 4103 - DNA, 13 bp, Artificial Sequence
  Description of Artificial Sequence: Synthetic primer
atcggcaatctgc

SEQ ID NO: 4104 - DNA, 13 bp, Artificial Sequence
  Description of Artificial Sequence: Synthetic primer
aggagctaaccgc

SEQ ID NO: 4105 - DNA, 13 bp, Artificial Sequence
  Description of Artificial Sequence: Synthetic primer
gacatatcccaag

SEQ ID NO: 4106 - DNA, 13 bp, Artificial Sequence
  Description of Artificial Sequence: Synthetic primer
ttgatgttggtat

SEQ ID NO: 4107 - DNA, 13 bp, Artificial Sequence
  Description of Artificial Sequence: Synthetic primer
gcagaacgtgcag

SEQ ID NO: 4108 - DNA, 13 bp, Artificial Sequence
  Description of Artificial Sequence: Synthetic primer
agaaggccgcgca

SEQ ID NO: 4109 - DNA, 13 bp, Artificial Sequence
  Description of Artificial Sequence: Synthetic primer
aggatgtttatac

SEQ ID NO: 4110 - DNA, 13 bp, Artificial Sequence
  Description of Artificial Sequence: Synthetic primer
cagcaccatcgcc

SEQ ID NO: 4111 - DNA, 13 bp, Artificial Sequence
  Description of Artificial Sequence: Synthetic primer
cgtaccgaccgag

SEQ ID NO: 4112 - DNA, 13 bp, Artificial Sequence
  Description of Artificial Sequence: Synthetic primer
tttaagtgatttc

SEQ ID NO: 4113 - DNA, 13 bp, Artificial Sequence
  Description of Artificial Sequence: Synthetic primer
tataattgtcatg

SEQ ID NO: 4114 - DNA, 13 bp, Artificial Sequence
  Description of Artificial Sequence: Synthetic primer
gggtcatgtttgc

SEQ ID NO: 4115 - DNA, 13 bp, Artificial Sequence
  Description of Artificial Sequence: Synthetic primer
tggcgcgctgtta

SEQ ID NO: 4116 - DNA, 13 bp, Artificial Sequence
  Description of Artificial Sequence: Synthetic primer
tatggttcgccac

SEQ ID NO: 4117 - DNA, 13 bp, Artificial Sequence
  Description of Artificial Sequence: Synthetic primer
accgctgccgcta

SEQ ID NO: 4118 - DNA, 13 bp, Artificial Sequence
  Description of Artificial Sequence: Synthetic primer
ggagcacgcgttg

SEQ ID NO: 4119 - DNA, 13 bp, Artificial Sequence
  Description of Artificial Sequence: Synthetic primer
atgatggaaggcc

SEQ ID NO: 4120 - DNA, 13 bp, Artificial Sequence
  Description of Artificial Sequence: Synthetic primer
gttgatgtcggcc

SEQ ID NO: 4121 - DNA, 13 bp, Artificial Sequence
  Description of Artificial Sequence: Synthetic primer
ccgtcttcagccg

SEQ ID NO: 4122 - DNA, 13 bp, Artificial Sequence
  Description of Artificial Sequence: Synthetic primer
tttctttgctagt

SEQ ID NO: 4123 - DNA, 13 bp, Artificial Sequence
  Description of Artificial Sequence: Synthetic primer
tgctggccatggt

SEQ ID NO: 4124 - DNA, 13 bp, Artificial Sequence
  Description of Artificial Sequence: Synthetic primer
aatgcaacaatag

SEQ ID NO: 4125 - DNA, 13 bp, Artificial Sequence
  Description of Artificial Sequence: Synthetic primer
cagctgtttccca

SEQ ID NO: 4126 - DNA, 13 bp, Artificial Sequence
  Description of Artificial Sequence: Synthetic primer
agcgtcacgccga

SEQ ID NO: 4127 - DNA, 13 bp, Artificial Sequence
  Description of Artificial Sequence: Synthetic primer
gaccttcgcactg

SEQ ID NO: 4128 - DNA, 13 bp, Artificial Sequence
  Description of Artificial Sequence: Synthetic primer
gacgttgcaggaa

SEQ ID NO: 4129 - DNA, 13 bp, Artificial Sequence
  Description of Artificial Sequence: Synthetic primer
agcagtttctcga

SEQ ID NO: 4130 - DNA, 13 bp, Artificial Sequence
  Description of Artificial Sequence: Synthetic primer
tgctgccgaacat

SEQ ID NO: 4131 - DNA, 13 bp, Artificial Sequence
  Description of Artificial Sequence: Synthetic primer
gcttctttcggcg

SEQ ID NO: 4132 - DNA, 13 bp, Artificial Sequence
  Description of Artificial Sequence: Synthetic primer
tgctggtgggcgt

SEQ ID NO: 4133 - DNA, 13 bp, Artificial Sequence
  Description of Artificial Sequence: Synthetic primer
gtactcttgcctg

SEQ ID NO: 4134 - DNA, 13 bp, Artificial Sequence
  Description of Artificial Sequence: Synthetic primer
tgctcgatctggc

SEQ ID NO: 4135 - DNA, 13 bp, Artificial Sequence
  Description of Artificial Sequence: Synthetic primer
ggcgcagaacatc

SEQ ID NO: 4136 - DNA, 13 bp, Artificial Sequence
  Description of Artificial Sequence: Synthetic primer
acgccctgttcgc

SEQ ID NO: 4137 - DNA, 13 bp, Artificial Sequence
  Description of Artificial Sequence: Synthetic primer
acctggaagaaca

SEQ ID NO: 4138 - DNA, 13 bp, Artificial Sequence
  Description of Artificial Sequence: Synthetic primer
catacatggatta

SEQ ID NO: 4139 - DNA, 13 bp, Artificial Sequence
  Description of Artificial Sequence: Synthetic primer
tggagtccgatta

SEQ ID NO: 4140 - DNA, 13 bp, Artificial Sequence
  Description of Artificial Sequence: Synthetic primer
taattgtaccaat

SEQ ID NO: 4141 - DNA, 13 bp, Artificial Sequence
  Description of Artificial Sequence: Synthetic primer
cacaatggccatg

SEQ ID NO: 4142 - DNA, 13 bp, Artificial Sequence
  Description of Artificial Sequence: Synthetic primer
aatccatgttttg

SEQ ID NO: 4143 - DNA, 13 bp, Artificial Sequence
  Description of Artificial Sequence: Synthetic primer
accatggccaagg

SEQ ID NO: 4144 - DNA, 13 bp, Artificial Sequence
  Description of Artificial Sequence: Synthetic primer
catcgtggtcgcc

SEQ ID NO: 4145 - DNA, 13 bp, Artificial Sequence
  Description of Artificial Sequence: Synthetic primer
aactactttgata

SEQ ID NO: 4146 - DNA, 13 bp, Artificial Sequence
  Description of Artificial Sequence: Synthetic primer
gattgtcattata

SEQ ID NO: 4147 - DNA, 13 bp, Artificial Sequence
  Description of Artificial Sequence: Synthetic primer
gttcgtaatagct

SEQ ID NO: 4148 - DNA, 13 bp, Artificial Sequence
  Description of Artificial Sequence: Synthetic primer
gggttgctccgag

SEQ ID NO: 4149 - DNA, 13 bp, Artificial Sequence
  Description of Artificial Sequence: Synthetic primer
aggtattctgtaa

SEQ ID NO: 4150 - DNA, 13 bp, Artificial Sequence
  Description of Artificial Sequence: Synthetic primer
cttaggaacatta

SEQ ID NO: 4151 - DNA, 13 bp, Artificial Sequence
  Description of Artificial Sequence: Synthetic primer
aggtataaatcat

SEQ ID NO: 4152 - DNA, 13 bp, Artificial Sequence
  Description of Artificial Sequence: Synthetic primer
tgagaatggtgct

SEQ ID NO: 4153 - DNA, 13 bp, Artificial Sequence
  Description of Artificial Sequence: Synthetic primer
tacttctgcttgg

SEQ ID NO: 4154 - DNA, 13 bp, Artificial Sequence
  Description of Artificial Sequence: Synthetic primer
ctggcaaccttcg

SEQ ID NO: 4155 - DNA, 13 bp, Artificial Sequence
  Description of Artificial Sequence: Synthetic primer
ttcatccttcatt

SEQ ID NO: 4156 - DNA, 13 bp, Artificial Sequence
  Description of Artificial Sequence: Synthetic primer
atttccaccaggt

SEQ ID NO: 4157 - DNA, 13 bp, Artificial Sequence
  Description of Artificial Sequence: Synthetic primer
ttcgcgaacgggc

SEQ ID NO: 4158 - DNA, 13 bp, Artificial Sequence
  Description of Artificial Sequence: Synthetic primer
agaaataatcgga

SEQ ID NO: 4159 - DNA, 13 bp, Artificial Sequence
  Description of Artificial Sequence: Synthetic primer
gccaaggcgagga

SEQ ID NO: 4160 - DNA, 13 bp, Artificial Sequence
  Description of Artificial Sequence: Synthetic primer
gtcgtaggcacgc

SEQ ID NO: 4161 - DNA, 13 bp, Artificial Sequence
  Description of Artificial Sequence: Synthetic primer
gcaatcccgtcga

SEQ ID NO: 4162 - DNA, 13 bp, Artificial Sequence
  Description of Artificial Sequence: Synthetic primer
cattgcttgaact

SEQ ID NO: 4163 - DNA, 13 bp, Artificial Sequence
  Description of Artificial Sequence: Synthetic primer
tgattgctcagca

SEQ ID NO: 4164 - DNA, 13 bp, Artificial Sequence
  Description of Artificial Sequence: Synthetic primer
aggatttagaagt

SEQ ID NO: 4165 - DNA, 13 bp, Artificial Sequence
  Description of Artificial Sequence: Synthetic primer
ttcattacatcta

SEQ ID NO: 4166 - DNA, 13 bp, Artificial Sequence
  Description of Artificial Sequence: Synthetic primer
caagcctctactg

SEQ ID NO: 4167 - DNA, 13 bp, Artificial Sequence
  Description of Artificial Sequence: Synthetic primer
cagcaggcgccta

SEQ ID NO: 4168 - DNA, 13 bp, Artificial Sequence
  Description of Artificial Sequence: Synthetic primer
tccatattgggca

SEQ ID NO: 4169 - DNA, 13 bp, Artificial Sequence
  Description of Artificial Sequence: Synthetic primer
atgttcatgccgc

SEQ ID NO: 4170 - DNA, 13 bp, Artificial Sequence
  Description of Artificial Sequence: Synthetic primer
ccaatgtggctag

SEQ ID NO: 4171 - DNA, 13 bp, Artificial Sequence
  Description of Artificial Sequence: Synthetic primer
ctttcatagtgga

SEQ ID NO: 4172 - DNA, 13 bp, Artificial Sequence
  Description of Artificial Sequence: Synthetic primer
agctgccaactgg

SEQ ID NO: 4173 - DNA, 13 bp, Artificial Sequence
  Description of Artificial Sequence: Synthetic primer
ggcggactacaaa

SEQ ID NO: 4174 - DNA, 13 bp, Artificial Sequence
  Description of Artificial Sequence: Synthetic primer
aagatcgttttcg

SEQ ID NO: 4175 - DNA, 13 bp, Artificial Sequence
  Description of Artificial Sequence: Synthetic primer
ctcgcggttgcca

SEQ ID NO: 4176 - DNA, 13 bp, Artificial Sequence
  Description of Artificial Sequence: Synthetic primer
tcacgccaccttt

SEQ ID NO: 4177 - DNA, 13 bp, Artificial Sequence
  Description of Artificial Sequence: Synthetic primer
gtctgtttggcgc

SEQ ID NO: 4178 - DNA, 13 bp, Artificial Sequence
  Description of Artificial Sequence: Synthetic primer
accatcgcgtgca

SEQ ID NO: 4179 - DNA, 13 bp, Artificial Sequence
  Description of Artificial Sequence: Synthetic primer
aagctgcgagggc

SEQ ID NO: 4180 - DNA, 13 bp, Artificial Sequence
  Description of Artificial Sequence: Synthetic primer
gtgttcgagcaaa

SEQ ID NO: 4181 - DNA, 13 bp, Artificial Sequence
  Description of Artificial Sequence: Synthetic primer
atggaatgccgga

SEQ ID NO: 4182 - DNA, 13 bp, Artificial Sequence
  Description of Artificial Sequence: Synthetic primer
aaatggcgatgat

SEQ ID NO: 4183 - DNA, 13 bp, Artificial Sequence
  Description of Artificial Sequence: Synthetic primer
accgcagagaaca

SEQ ID NO: 4184 - DNA, 13 bp, Artificial Sequence
  Description of Artificial Sequence: Synthetic primer
attcgcccagggc

SEQ ID NO: 4185 - DNA, 13 bp, Artificial Sequence
  Description of Artificial Sequence: Synthetic primer
cccgaaagctgtg

SEQ ID NO: 4186 - DNA, 13 bp, Artificial Sequence
  Description of Artificial Sequence: Synthetic primer
aaagtggttggat

SEQ ID NO: 4187 - DNA, 13 bp, Artificial Sequence
  Description of Artificial Sequence: Synthetic primer
aatggcgtgaact

SEQ ID NO: 4188 - DNA, 13 bp, Artificial Sequence
  Description of Artificial Sequence: Synthetic primer
gtcgcacacaccc

SEQ ID NO: 4189 - DNA, 13 bp, Artificial Sequence
  Description of Artificial Sequence: Synthetic primer
ttgctgttgcttt

SEQ ID NO: 4190 - DNA, 13 bp, Artificial Sequence
  Description of Artificial Sequence: Synthetic primer
gtcttcagcagtc

SEQ ID NO: 4191 - DNA, 13 bp, Artificial Sequence
  Description of Artificial Sequence: Synthetic primer
aacgctattccct

SEQ ID NO: 4192 - DNA, 13 bp, Artificial Sequence
  Description of Artificial Sequence: Synthetic primer
gaactgaagaaaa

SEQ ID NO: 4193 - DNA, 13 bp, Artificial Sequence
  Description of Artificial Sequence: Synthetic primer
gcttttaatgcca

SEQ ID NO: 4194 - DNA, 13 bp, Artificial Sequence
  Description of Artificial Sequence: Synthetic primer
gcgctgcaggaca

SEQ ID NO: 4195 - DNA, 13 bp, Artificial Sequence
  Description of Artificial Sequence: Synthetic primer
tctgacaattcct

SEQ ID NO: 4196 - DNA, 13 bp, Artificial Sequence
  Description of Artificial Sequence: Synthetic primer
gcttgatggagca

SEQ ID NO: 4197 - DNA, 13 bp, Artificial Sequence
  Description of Artificial Sequence: Synthetic primer
aagtcagacttac

SEQ ID NO: 4198 - DNA, 13 bp, Artificial Sequence
  Description of Artificial Sequence: Synthetic primer
tgacaatgcgaat

SEQ ID NO: 4199 - DNA, 13 bp, Artificial Sequence
  Description of Artificial Sequence: Synthetic primer
cgaaagattccgt

SEQ ID NO: 4200 - DNA, 13 bp, Artificial Sequence
  Description of Artificial Sequence: Synthetic primer
gtatcgcctgcag

SEQ ID NO: 4201 - DNA, 13 bp, Artificial Sequence
  Description of Artificial Sequence: Synthetic primer
gtaaaagttcgcc

SEQ ID NO: 4202 - DNA, 13 bp, Artificial Sequence
  Description of Artificial Sequence: Synthetic primer
tggccaaaccatc

SEQ ID NO: 4203 - DNA, 13 bp, Artificial Sequence
  Description of Artificial Sequence: Synthetic primer
agctggccgagct

SEQ ID NO: 4204 - DNA, 13 bp, Artificial Sequence
  Description of Artificial Sequence: Synthetic primer
cccacacctacct

SEQ ID NO: 4205 - DNA, 13 bp, Artificial Sequence
  Description of Artificial Sequence: Synthetic primer
atacaggttatgc

SEQ ID NO: 4206 - DNA, 13 bp, Artificial Sequence
  Description of Artificial Sequence: Synthetic primer
tgccattcgtgaa

SEQ ID NO: 4207 - DNA, 13 bp, Artificial Sequence
  Description of Artificial Sequence: Synthetic primer
acgtgtgcaaaca

SEQ ID NO: 4208 - DNA, 13 bp, Artificial Sequence
  Description of Artificial Sequence: Synthetic primer
tgaaatcaaactt

SEQ ID NO: 4209 - DNA, 13 bp, Artificial Sequence
  Description of Artificial Sequence: Synthetic primer
gcgatgtgattga

SEQ ID NO: 4210 - DNA, 13 bp, Artificial Sequence
  Description of Artificial Sequence: Synthetic primer
ggtagatcgccac

SEQ ID NO: 4211 - DNA, 13 bp, Artificial Sequence
  Description of Artificial Sequence: Synthetic primer
tagtagctattac

SEQ ID NO: 4212 - DNA, 13 bp, Artificial Sequence
  Description of Artificial Sequence: Synthetic primer
ttccttcattaca

SEQ ID NO: 4213 - DNA, 13 bp, Artificial Sequence
  Description of Artificial Sequence: Synthetic primer
agcttgaggggtt

SEQ ID NO: 4214 - DNA, 13 bp, Artificial Sequence
  Description of Artificial Sequence: Synthetic primer
tcggtcgacgagg

SEQ ID NO: 4215 - DNA, 13 bp, Artificial Sequence
  Description of Artificial Sequence: Synthetic primer
aaacggcgtggtg

SEQ ID NO: 4216 - DNA, 13 bp, Artificial Sequence
  Description of Artificial Sequence: Synthetic primer
attagtgcgggaa

SEQ ID NO: 4217 - DNA, 13 bp, Artificial Sequence
  Description of Artificial Sequence: Synthetic primer
ggaggctacttag

SEQ ID NO: 4218 - DNA, 13 bp, Artificial Sequence
  Description of Artificial Sequence: Synthetic primer
aattggttccaca

SEQ ID NO: 4219 - DNA, 13 bp, Artificial Sequence
  Description of Artificial Sequence: Synthetic primer
tatgatatcctct

SEQ ID NO: 4220 - DNA, 13 bp, Artificial Sequence
  Description of Artificial Sequence: Synthetic primer
gtggtatctctgc

SEQ ID NO: 4221 - DNA, 13 bp, Artificial Sequence
  Description of Artificial Sequence: Synthetic primer
tgcgcagtacctg

SEQ ID NO: 4222 - DNA, 13 bp, Artificial Sequence
  Description of Artificial Sequence: Synthetic primer
gcatgacagtaag

SEQ ID NO: 4223 - DNA, 13 bp, Artificial Sequence
  Description of Artificial Sequence: Synthetic primer
gagctcacagaat

SEQ ID NO: 4224 - DNA, 13 bp, Artificial Sequence
  Description of Artificial Sequence: Synthetic primer
gagcagggtctcc

SEQ ID NO: 4225 - DNA, 13 bp, Artificial Sequence
  Description of Artificial Sequence: Synthetic primer
caggttatattcc

SEQ ID NO: 4226 - DNA, 13 bp, Artificial Sequence
  Description of Artificial Sequence: Synthetic primer
acgtcatgtgcca

SEQ ID NO: 4227 - DNA, 13 bp, Artificial Sequence
  Description of Artificial Sequence: Synthetic primer
tttcactaaacca

SEQ ID NO: 4228 - DNA, 13 bp, Artificial Sequence
  Description of Artificial Sequence: Synthetic primer
caagatgcgcctc

SEQ ID NO: 4229 - DNA, 13 bp, Artificial Sequence
  Description of Artificial Sequence: Synthetic primer
gtttggcatggtg

SEQ ID NO: 4230 - DNA, 13 bp, Artificial Sequence
  Description of Artificial Sequence: Synthetic primer
ttggccgcgagat

SEQ ID NO: 4231 - DNA, 13 bp, Artificial Sequence
  Description of Artificial Sequence: Synthetic primer
acactgggttccc

SEQ ID NO: 4232 - DNA, 13 bp, Artificial Sequence
  Description of Artificial Sequence: Synthetic primer
agttgaatgggta

SEQ ID NO: 4233 - DNA, 13 bp, Artificial Sequence
  Description of Artificial Sequence: Synthetic primer
agaaactgttggg

SEQ ID NO: 4234 - DNA, 13 bp, Artificial Sequence
  Description of Artificial Sequence: Synthetic primer
aaacgctccttcc

SEQ ID NO: 4235 - DNA, 13 bp, Artificial Sequence
  Description of Artificial Sequence: Synthetic primer
tcgttcacgtaca

SEQ ID NO: 4236 - DNA, 13 bp, Artificial Sequence
  Description of Artificial Sequence: Synthetic primer
tcacgcgcgcgta

SEQ ID NO: 4237 - DNA, 13 bp, Artificial Sequence
  Description of Artificial Sequence: Synthetic primer
gttttgcagacag

SEQ ID NO: 4238 - DNA, 13 bp, Artificial Sequence
  Description of Artificial Sequence: Synthetic primer
attctgcggcgcg

SEQ ID NO: 4239 - DNA, 13 bp, Artificial Sequence
  Description of Artificial Sequence: Synthetic primer
ggtgaaaagttgt

SEQ ID NO: 4240 - DNA, 13 bp, Artificial Sequence
  Description of Artificial Sequence: Synthetic primer
caggttccgaaat

SEQ ID NO: 4241 - DNA, 13 bp, Artificial Sequence
  Description of Artificial Sequence: Synthetic primer
gccacacttattc

SEQ ID NO: 4242 - DNA, 13 bp, Artificial Sequence
  Description of Artificial Sequence: Synthetic primer
tactgaagtttgc

SEQ ID NO: 4243 - DNA, 13 bp, Artificial Sequence
  Description of Artificial Sequence: Synthetic primer
accgtcatcaccc

SEQ ID NO: 4244 - DNA, 13 bp, Artificial Sequence
  Description of Artificial Sequence: Synthetic primer
gcaagcgaatgtg

SEQ ID NO: 4245 - DNA, 13 bp, Artificial Sequence
  Description of Artificial Sequence: Synthetic primer
ttcggcatcgtca

SEQ ID NO: 4246 - DNA, 13 bp, Artificial Sequence
  Description of Artificial Sequence: Synthetic primer
aaagcagcaggtg

SEQ ID NO: 4247 - DNA, 13 bp, Artificial Sequence
  Description of Artificial Sequence: Synthetic primer
gccgtcggtggat

SEQ ID NO: 4248 - DNA, 13 bp, Artificial Sequence
  Description of Artificial Sequence: Synthetic primer
acgccgaaaccgc

SEQ ID NO: 4249 - DNA, 13 bp, Artificial Sequence
  Description of Artificial Sequence: Synthetic primer
acgcaggctgagg

SEQ ID NO: 4250 - DNA, 13 bp, Artificial Sequence
  Description of Artificial Sequence: Synthetic primer
attttcaaacctt

SEQ ID NO: 4251 - DNA, 13 bp, Artificial Sequence
  Description of Artificial Sequence: Synthetic primer
catggcagcacgt

SEQ ID NO: 4252 - DNA, 13 bp, Artificial Sequence
  Description of Artificial Sequence: Synthetic primer
ggcttcggtgttc

SEQ ID NO: 4253 - DNA, 13 bp, Artificial Sequence
  Description of Artificial Sequence: Synthetic primer
ttacgaaaatcgc

SEQ ID NO: 4254 - DNA, 13 bp, Artificial Sequence
  Description of Artificial Sequence: Synthetic primer
catttgggttggg

SEQ ID NO: 4255 - DNA, 13 bp, Artificial Sequence
  Description of Artificial Sequence: Synthetic primer
gcagcgcatgcac

SEQ ID NO: 4256 - DNA, 13 bp, Artificial Sequence
  Description of Artificial Sequence: Synthetic primer
ccttccatgtcac

SEQ ID NO: 4257 - DNA, 13 bp, Artificial Sequence
  Description of Artificial Sequence: Synthetic primer
tggccatgccttt

SEQ ID NO: 4258 - DNA, 13 bp, Artificial Sequence
  Description of Artificial Sequence: Synthetic primer
cgtggagtcgctc

SEQ ID NO: 4259 - DNA, 13 bp, Artificial Sequence
  Description of Artificial Sequence: Synthetic primer
cttaatgcttata

SEQ ID NO: 4260 - DNA, 13 bp, Artificial Sequence
  Description of Artificial Sequence: Synthetic primer
ccgtcgagagttt

SEQ ID NO: 4261 - DNA, 13 bp, Artificial Sequence
  Description of Artificial Sequence: Synthetic primer
aaaactttcgtta

SEQ ID NO: 4262 - DNA, 13 bp, Artificial Sequence
  Description of Artificial Sequence: Synthetic primer
ctcatcgagcatc

SEQ ID NO: 4263 - DNA, 13 bp, Artificial Sequence
  Description of Artificial Sequence: Synthetic primer
tacgccctacacg

SEQ ID NO: 4264 - DNA, 13 bp, Artificial Sequence
  Description of Artificial Sequence: Synthetic primer
catgcgattgctc

SEQ ID NO: 4265 - DNA, 13 bp, Artificial Sequence
  Description of Artificial Sequence: Synthetic primer
ctgcggccgatgt

SEQ ID NO: 4266 - DNA, 13 bp, Artificial Sequence
  Description of Artificial Sequence: Synthetic primer
tgattgccgccca

SEQ ID NO: 4267 - DNA, 13 bp, Artificial Sequence
  Description of Artificial Sequence: Synthetic primer
gtaacgatcagct

SEQ ID NO: 4268 - DNA, 13 bp, Artificial Sequence
  Description of Artificial Sequence: Synthetic primer
gctcgaatgcctg

SEQ ID NO: 4269 - DNA, 13 bp, Artificial Sequence
  Description of Artificial Sequence: Synthetic primer
atggcttttaccg

SEQ ID NO: 4270 - DNA, 13 bp, Artificial Sequence
  Description of Artificial Sequence: Synthetic primer
gcccacgttgacg

SEQ ID NO: 4271 - DNA, 13 bp, Artificial Sequence
  Description of Artificial Sequence: Synthetic primer
ccgcatatgtaat

SEQ ID NO: 4272 - DNA, 13 bp, Artificial Sequence
  Description of Artificial Sequence: Synthetic primer
cgaagctggtcaa

SEQ ID NO: 4273 - DNA, 13 bp, Artificial Sequence
  Description of Artificial Sequence: Synthetic primer
ggcctacacggtg

SEQ ID NO: 4274 - DNA, 13 bp, Artificial Sequence
  Description of Artificial Sequence: Synthetic primer
agaccctgttcga

SEQ ID NO: 4275 - DNA, 13 bp, Artificial Sequence
  Description of Artificial Sequence: Synthetic primer
aggccatgggcag

SEQ ID NO: 4276 - DNA, 13 bp, Artificial Sequence
  Description of Artificial Sequence: Synthetic primer
acaaaactattgc

SEQ ID NO: 4277 - DNA, 13 bp, Artificial Sequence
  Description of Artificial Sequence: Synthetic primer
accttcctgatcg

SEQ ID NO: 4278 - DNA, 13 bp, Artificial Sequence
  Description of Artificial Sequence: Synthetic primer
tatcgctacaaca

SEQ ID NO: 4279 - DNA, 13 bp, Artificial Sequence
  Description of Artificial Sequence: Synthetic primer
cgtttgccacggg

SEQ ID NO: 4280 - DNA, 13 bp, Artificial Sequence
  Description of Artificial Sequence: Synthetic primer
tgcggcaacagta

SEQ ID NO: 4281 - DNA, 13 bp, Artificial Sequence
  Description of Artificial Sequence: Synthetic primer
tttgcctgcatat

SEQ ID NO: 4282 - DNA, 13 bp, Artificial Sequence
  Description of Artificial Sequence: Synthetic primer
ttgtgtctggtgc

SEQ ID NO: 4283 - DNA, 13 bp, Artificial Sequence
  Description of Artificial Sequence: Synthetic primer
cagaggttggagt

SEQ ID NO: 4284 - DNA, 13 bp, Artificial Sequence
  Description of Artificial Sequence: Synthetic primer
tagtggtcgtaga

SEQ ID NO: 4285 - DNA, 13 bp, Artificial Sequence
  Description of Artificial Sequence: Synthetic primer
tcagtgcttcgaa

SEQ ID NO: 4286 - DNA, 13 bp, Artificial Sequence
  Description of Artificial Sequence: Synthetic primer
gccccaaataaca

SEQ ID NO: 4287 - DNA, 13 bp, Artificial Sequence
  Description of Artificial Sequence: Synthetic primer
tgcagaacgcaca

SEQ ID NO: 4288 - DNA, 13 bp, Artificial Sequence
  Description of Artificial Sequence: Synthetic primer
agttgctctctta

SEQ ID NO: 4289 - DNA, 13 bp, Artificial Sequence
  Description of Artificial Sequence: Synthetic primer
gcagaagactcgc

SEQ ID NO: 4290 - DNA, 13 bp, Artificial Sequence
  Description of Artificial Sequence: Synthetic primer
gctagtcaaactc

SEQ ID NO: 4291 - DNA, 13 bp, Artificial Sequence
  Description of Artificial Sequence: Synthetic primer
gttactaccacaa

SEQ ID NO: 4292 - DNA, 13 bp, Artificial Sequence
  Description of Artificial Sequence: Synthetic primer
tatttcccgggag

SEQ ID NO: 4293 - DNA, 13 bp, Artificial Sequence
  Description of Artificial Sequence: Synthetic primer
gagcggcatcgca

SEQ ID NO: 4294 - DNA, 13 bp, Artificial Sequence
  Description of Artificial Sequence: Synthetic primer
actgataaacgcc

SEQ ID NO: 4295 - DNA, 13 bp, Artificial Sequence
  Description of Artificial Sequence: Synthetic primer
acaaagaaaatag

SEQ ID NO: 4296 - DNA, 13 bp, Artificial Sequence
  Description of Artificial Sequence: Synthetic primer
ggcttcactagct

SEQ ID NO: 4297 - DNA, 13 bp, Artificial Sequence
  Description of Artificial Sequence: Synthetic primer
atactcacccgtg

SEQ ID NO: 4298 - DNA, 13 bp, Artificial Sequence
  Description of Artificial Sequence: Synthetic primer
ccaccctcgacga

SEQ ID NO: 4299 - DNA, 13 bp, Artificial Sequence
  Description of Artificial Sequence: Synthetic primer
atgaataaccatt

SEQ ID NO: 4300 - DNA, 13 bp, Artificial Sequence
  Description of Artificial Sequence: Synthetic primer
gctgaagctcggc

SEQ ID NO: 4301 - DNA, 13 bp, Artificial Sequence
  Description of Artificial Sequence: Synthetic primer
gtttcccaaattc

SEQ ID NO: 4302 - DNA, 13 bp, Artificial Sequence
  Description of Artificial Sequence: Synthetic primer
tgaacccgcttta

SEQ ID NO: 4303 - DNA, 13 bp, Artificial Sequence
  Description of Artificial Sequence: Synthetic primer
agcacgacaattg

SEQ ID NO: 4304 - DNA, 13 bp, Artificial Sequence
  Description of Artificial Sequence: Synthetic primer
cgagctggccgaa

SEQ ID NO: 4305 - DNA, 13 bp, Artificial Sequence
  Description of Artificial Sequence: Synthetic primer
ttatggcataaac

SEQ ID NO: 4306 - DNA, 13 bp, Artificial Sequence
  Description of Artificial Sequence: Synthetic primer
cagctcgtccatc

SEQ ID NO: 4307 - DNA, 13 bp, Artificial Sequence
  Description of Artificial Sequence: Synthetic primer
aaagaaattgccc

SEQ ID NO: 4308 - DNA, 13 bp, Artificial Sequence
  Description of Artificial Sequence: Synthetic primer
ttgtattggcgga

SEQ ID NO: 4309 - DNA, 13 bp, Artificial Sequence
  Description of Artificial Sequence: Synthetic primer
cttatcagggtca

SEQ ID NO: 4310 - DNA, 13 bp, Artificial Sequence
  Description of Artificial Sequence: Synthetic primer
gatatcaatggta

SEQ ID NO: 4311 - DNA, 13 bp, Artificial Sequence
  Description of Artificial Sequence: Synthetic primer
tgccattaaaaga

SEQ ID NO: 4312 - DNA, 13 bp, Artificial Sequence
  Description of Artificial Sequence: Synthetic primer
ccatcgccgcgaa

SEQ ID NO: 4313 - DNA, 13 bp, Artificial Sequence
  Description of Artificial Sequence: Synthetic primer
gataaacaaattg

SEQ ID NO: 4314 - DNA, 13 bp, Artificial Sequence
  Description of Artificial Sequence: Synthetic primer
atggcgaaagtcg

SEQ ID NO: 4315 - DNA, 13 bp, Artificial Sequence
  Description of Artificial Sequence: Synthetic primer
ctcggcgtttcat

SEQ ID NO: 4316 - DNA, 13 bp, Artificial Sequence
  Description of Artificial Sequence: Synthetic primer
ttcaccgtggcat

SEQ ID NO: 4317 - DNA, 13 bp, Artificial Sequence
  Description of Artificial Sequence: Synthetic primer
atatggctcaccg

SEQ ID NO: 4318 - DNA, 13 bp, Artificial Sequence
  Description of Artificial Sequence: Synthetic primer
ccaacgcgcttgg

SEQ ID NO: 4319 - DNA, 13 bp, Artificial Sequence
  Description of Artificial Sequence: Synthetic primer
tttgctcttacaa

SEQ ID NO: 4320 - DNA, 13 bp, Artificial Sequence
  Description of Artificial Sequence: Synthetic primer
cttcctgcgataa

SEQ ID NO: 4321 - DNA, 13 bp, Artificial Sequence
  Description of Artificial Sequence: Synthetic primer
gtaattcgctaac

SEQ ID NO: 4322 - DNA, 13 bp, Artificial Sequence
  Description of Artificial Sequence: Synthetic primer
caaacacagttca

SEQ ID NO: 4323 - DNA, 13 bp, Artificial Sequence
  Description of Artificial Sequence: Synthetic primer
tgagcgtcgcgaa

SEQ ID NO: 4324 - DNA, 13 bp, Artificial Sequence
  Description of Artificial Sequence: Synthetic primer
ctttgtattggac

SEQ ID NO: 4325 - DNA, 13 bp, Artificial Sequence
  Description of Artificial Sequence: Synthetic primer
cggtgatggcgac

SEQ ID NO: 4326 - DNA, 13 bp, Artificial Sequence
  Description of Artificial Sequence: Synthetic primer
taaggcctgccag

SEQ ID NO: 4327 - DNA, 13 bp, Artificial Sequence
  Description of Artificial Sequence: Synthetic primer
tgctggaaagcct

SEQ ID NO: 4328 - DNA, 13 bp, Artificial Sequence
  Description of Artificial Sequence: Synthetic primer
tggtctatttgac

SEQ ID NO: 4329 - DNA, 13 bp, Artificial Sequence
  Description of Artificial Sequence: Synthetic primer
tgatcggcccgct

SEQ ID NO: 4330 - DNA, 13 bp, Artificial Sequence
  Description of Artificial Sequence: Synthetic primer
acttgacccactt

SEQ ID NO: 4331 - DNA, 13 bp, Artificial Sequence
  Description of Artificial Sequence: Synthetic primer
gaatcaatcctac

SEQ ID NO: 4332 - DNA, 13 bp, Artificial Sequence
  Description of Artificial Sequence: Synthetic primer
aaaacaaagtccc

SEQ ID NO: 4333 - DNA, 13 bp, Artificial Sequence
  Description of Artificial Sequence: Synthetic primer
tacggttcgccgc

SEQ ID NO: 4334 - DNA, 13 bp, Artificial Sequence
  Description of Artificial Sequence: Synthetic primer
gcctatccacgct

SEQ ID NO: 4335 - DNA, 13 bp, Artificial Sequence
  Description of Artificial Sequence: Synthetic primer
taagctggagccg

SEQ ID NO: 4336 - DNA, 13 bp, Artificial Sequence
  Description of Artificial Sequence: Synthetic primer
gatgcgctcgtgc

SEQ ID NO: 4337 - DNA, 13 bp, Artificial Sequence
  Description of Artificial Sequence: Synthetic primer
cacgcttagcata

SEQ ID NO: 4338 - DNA, 13 bp, Artificial Sequence
  Description of Artificial Sequence: Synthetic primer
cctgctggaccac

SEQ ID NO: 4339 - DNA, 13 bp, Artificial Sequence
  Description of Artificial Sequence: Synthetic primer
tcttggtcgagag

SEQ ID NO: 4340 - DNA, 13 bp, Artificial Sequence
  Description of Artificial Sequence: Synthetic primer
taccgccattttg

SEQ ID NO: 4341 - DNA, 13 bp, Artificial Sequence
  Description of Artificial Sequence: Synthetic primer
ttggtgcactaag

SEQ ID NO: 4342 - DNA, 13 bp, Artificial Sequence
  Description of Artificial Sequence: Synthetic primer
caaagaactgtaa

SEQ ID NO: 4343 - DNA, 13 bp, Artificial Sequence
  Description of Artificial Sequence: Synthetic primer
ccggctctcgatc

SEQ ID NO: 4344 - DNA, 13 bp, Artificial Sequence
  Description of Artificial Sequence: Synthetic primer
ggtcagcatacag

SEQ ID NO: 4345 - DNA, 13 bp, Artificial Sequence
  Description of Artificial Sequence: Synthetic primer
ccattaaataaca

SEQ ID NO: 4346 - DNA, 13 bp, Artificial Sequence
  Description of Artificial Sequence: Synthetic primer
atcccaatgtctt

SEQ ID NO: 4347 - DNA, 13 bp, Artificial Sequence
  Description of Artificial Sequence: Synthetic primer
aattcagggtcaa

SEQ ID NO: 4348 - DNA, 13 bp, Artificial Sequence
  Description of Artificial Sequence: Synthetic primer
ccggctcggttac

SEQ ID NO: 4349 - DNA, 13 bp, Artificial Sequence
  Description of Artificial Sequence: Synthetic primer
agacggtgattgc

SEQ ID NO: 4350 - DNA, 13 bp, Artificial Sequence
  Description of Artificial Sequence: Synthetic primer
aggacaaattccc

SEQ ID NO: 4351 - DNA, 13 bp, Artificial Sequence
  Description of Artificial Sequence: Synthetic primer
ttattggcttagc

SEQ ID NO: 4352 - DNA, 13 bp, Artificial Sequence
  Description of Artificial Sequence: Synthetic primer
gtactatatcatt

SEQ ID NO: 4353 - DNA, 13 bp, Artificial Sequence
  Description of Artificial Sequence: Synthetic primer
ccgtgatagctcg

SEQ ID NO: 4354 - DNA, 13 bp, Artificial Sequence
  Description of Artificial Sequence: Synthetic primer
gtgacctttgggt

SEQ ID NO: 4355 - DNA, 13 bp, Artificial Sequence
  Description of Artificial Sequence: Synthetic primer
cgtgatcgcgttc

SEQ ID NO: 4356 - DNA, 13 bp, Artificial Sequence
  Description of Artificial Sequence: Synthetic primer
ctcaaattagccc

SEQ ID NO: 4357 - DNA, 13 bp, Artificial Sequence
  Description of Artificial Sequence: Synthetic primer
tggcgagaccgga

SEQ ID NO: 4358 - DNA, 13 bp, Artificial Sequence
  Description of Artificial Sequence: Synthetic primer
tgttgcatttaca

SEQ ID NO: 4359 - DNA, 13 bp, Artificial Sequence
  Description of Artificial Sequence: Synthetic primer
tcgatccaataag

SEQ ID NO: 4360 - DNA, 13 bp, Artificial Sequence
  Description of Artificial Sequence: Synthetic primer
gtccgatgaccga

SEQ ID NO: 4361 - DNA, 13 bp, Artificial Sequence
  Description of Artificial Sequence: Synthetic primer
cagtaccagtaag

SEQ ID NO: 4362 - DNA, 13 bp, Artificial Sequence
  Description of Artificial Sequence: Synthetic primer
agccagtttgcca

SEQ ID NO: 4363 - DNA, 13 bp, Artificial Sequence
  Description of Artificial Sequence: Synthetic primer
gttaagacaattc

SEQ ID NO: 4364 - DNA, 13 bp, Artificial Sequence
  Description of Artificial Sequence: Synthetic primer
tttcttttcctta

SEQ ID NO: 4365 - DNA, 13 bp, Artificial Sequence
  Description of Artificial Sequence: Synthetic primer
ccttgatcgcccc

SEQ ID NO: 4366 - DNA, 13 bp, Artificial Sequence
  Description of Artificial Sequence: Synthetic primer
cttttgctcaatc

SEQ ID NO: 4367 - DNA, 13 bp, Artificial Sequence
  Description of Artificial Sequence: Synthetic primer
cggacatcgccaa

SEQ ID NO: 4368 - DNA, 13 bp, Artificial Sequence
  Description of Artificial Sequence: Synthetic primer
accgcggaggtga

SEQ ID NO: 4369 - DNA, 13 bp, Artificial Sequence
  Description of Artificial Sequence: Synthetic primer
ggcggatattcgt

SEQ ID NO: 4370 - DNA, 13 bp, Artificial Sequence
  Description of Artificial Sequence: Synthetic primer
ggctgtgcgctta

SEQ ID NO: 4371 - DNA, 13 bp, Artificial Sequence
  Description of Artificial Sequence: Synthetic primer
caggatattactg

SEQ ID NO: 4372 - DNA, 13 bp, Artificial Sequence
  Description of Artificial Sequence: Synthetic primer
gcgctaacacaat

SEQ ID NO: 4373 - DNA, 13 bp, Artificial Sequence
  Description of Artificial Sequence: Synthetic primer
gtattaaccgcgg

SEQ ID NO: 4374 - DNA, 13 bp, Artificial Sequence
  Description of Artificial Sequence: Synthetic primer
ttgtgcagggcac

SEQ ID NO: 4375 - DNA, 13 bp, Artificial Sequence
  Description of Artificial Sequence: Synthetic primer
tgtctctcatggc

SEQ ID NO: 4376 - DNA, 13 bp, Artificial Sequence
  Description of Artificial Sequence: Synthetic primer
cggcaaatgtgaa

SEQ ID NO: 4377 - DNA, 13 bp, Artificial Sequence
  Description of Artificial Sequence: Synthetic primer
tggagtagtcgac

SEQ ID NO: 4378 - DNA, 13 bp, Artificial Sequence
  Description of Artificial Sequence: Synthetic primer
ccgcgttgtttca

SEQ ID NO: 4379 - DNA, 13 bp, Artificial Sequence
  Description of Artificial Sequence: Synthetic primer
ggtggctgttggc

SEQ ID NO: 4380 - DNA, 13 bp, Artificial Sequence
  Description of Artificial Sequence: Synthetic primer
gatccctgctggt

SEQ ID NO: 4381 - DNA, 13 bp, Artificial Sequence
  Description of Artificial Sequence: Synthetic primer
tgactttattgga

SEQ ID NO: 4382 - DNA, 13 bp, Artificial Sequence
  Description of Artificial Sequence: Synthetic primer
gcagcacgtagaa

SEQ ID NO: 4383 - DNA, 13 bp, Artificial Sequence
  Description of Artificial Sequence: Synthetic primer
cacggattgactg

SEQ ID NO: 4384 - DNA, 13 bp, Artificial Sequence
  Description of Artificial Sequence: Synthetic primer
cgaaccggctttc

SEQ ID NO: 4385 - DNA, 13 bp, Artificial Sequence
  Description of Artificial Sequence: Synthetic primer
gcgattgcataaa

SEQ ID NO: 4386 - DNA, 13 bp, Artificial Sequence
  Description of Artificial Sequence: Synthetic primer
acgaggcttatgt

SEQ ID NO: 4387 - DNA, 13 bp, Artificial Sequence
  Description of Artificial Sequence: Synthetic primer
aagtctatgttga

SEQ ID NO: 4388 - DNA, 13 bp, Artificial Sequence
  Description of Artificial Sequence: Synthetic primer
acatcgaggaggg

SEQ ID NO: 4389 - DNA, 13 bp, Artificial Sequence
  Description of Artificial Sequence: Synthetic primer
atcatcggtcacg

SEQ ID NO: 4390 - DNA, 13 bp, Artificial Sequence
  Description of Artificial Sequence: Synthetic primer
gatggcttccatc

SEQ ID NO: 4391 - DNA, 13 bp, Artificial Sequence
  Description of Artificial Sequence: Synthetic primer
gatatccgcaacc

SEQ ID NO: 4392 - DNA, 13 bp, Artificial Sequence
  Description of Artificial Sequence: Synthetic primer
gggtatcggtgtg

SEQ ID NO: 4393 - DNA, 13 bp, Artificial Sequence
  Description of Artificial Sequence: Synthetic primer
aacctacaatcat

SEQ ID NO: 4394 - DNA, 13 bp, Artificial Sequence
  Description of Artificial Sequence: Synthetic primer
gatcccaagccct

SEQ ID NO: 4395 - DNA, 13 bp, Artificial Sequence
  Description of Artificial Sequence: Synthetic primer
aattgttcaaagc

SEQ ID NO: 4396 - DNA, 13 bp, Artificial Sequence
  Description of Artificial Sequence: Synthetic primer
aaactcactgaga

SEQ ID NO: 4397 - DNA, 13 bp, Artificial Sequence
  Description of Artificial Sequence: Synthetic primer
ttctgctccttta

SEQ ID NO: 4398 - DNA, 13 bp, Artificial Sequence
  Description of Artificial Sequence: Synthetic primer
tgatgtctaacag

SEQ ID NO: 4399 - DNA, 13 bp, Artificial Sequence
  Description of Artificial Sequence: Synthetic primer
ccttttgccctct

SEQ ID NO: 4400 - DNA, 13 bp, Artificial Sequence
  Description of Artificial Sequence: Synthetic primer
ttatgctgaccca

SEQ ID NO: 4401 - DNA, 13 bp, Artificial Sequence
  Description of Artificial Sequence: Synthetic primer
aaaacaggggaaa

SEQ ID NO: 4402 - DNA, 13 bp, Artificial Sequence
  Description of Artificial Sequence: Synthetic primer
gtgtgcttacaag

SEQ ID NO: 4403 - DNA, 13 bp, Artificial Sequence
  Description of Artificial Sequence: Synthetic primer
cgatcaagtgcgt

SEQ ID NO: 4404 - DNA, 13 bp, Artificial Sequence
  Description of Artificial Sequence: Synthetic primer
gcaatggcgttgg

SEQ ID NO: 4405 - DNA, 13 bp, Artificial Sequence
  Description of Artificial Sequence: Synthetic primer
aacaggagccact

SEQ ID NO: 4406 - DNA, 13 bp, Artificial Sequence
  Description of Artificial Sequence: Synthetic primer
aggctgaaaacca

SEQ ID NO: 4407 - DNA, 13 bp, Artificial Sequence
  Description of Artificial Sequence: Synthetic primer
gatcaagcatgac

SEQ ID NO: 4408 - DNA, 13 bp, Artificial Sequence
  Description of Artificial Sequence: Synthetic primer
tcggtgccgcagt

SEQ ID NO: 4409 - DNA, 13 bp, Artificial Sequence
  Description of Artificial Sequence: Synthetic primer
tttaatccactag

SEQ ID NO: 4410 - DNA, 13 bp, Artificial Sequence
  Description of Artificial Sequence: Synthetic primer
gacctgggcaaga

SEQ ID NO: 4411 - DNA, 13 bp, Artificial Sequence
  Description of Artificial Sequence: Synthetic primer
aatgaacctgcct

SEQ ID NO: 4412 - DNA, 13 bp, Artificial Sequence
  Description of Artificial Sequence: Synthetic primer
tggttgatctgaa

SEQ ID NO: 4413 - DNA, 13 bp, Artificial Sequence
  Description of Artificial Sequence: Synthetic primer
ccatcgcgtcgag

SEQ ID NO: 4414 - DNA, 13 bp, Artificial Sequence
  Description of Artificial Sequence: Synthetic primer
aagttcctgtcgc

SEQ ID NO: 4415 - DNA, 13 bp, Artificial Sequence
  Description of Artificial Sequence: Synthetic primer
gcccttgaggacc

SEQ ID NO: 4416 - DNA, 13 bp, Artificial Sequence
  Description of Artificial Sequence: Synthetic primer
gcgctgccttcga

SEQ ID NO: 4417 - DNA, 13 bp, Artificial Sequence
  Description of Artificial Sequence: Synthetic primer
tagttcgacaaag

SEQ ID NO: 4418 - DNA, 13 bp, Artificial Sequence
  Description of Artificial Sequence: Synthetic primer
caagagcgctggg

SEQ ID NO: 4419 - DNA, 13 bp, Artificial Sequence
  Description of Artificial Sequence: Synthetic primer
gtaattacctcta

SEQ ID NO: 4420 - DNA, 13 bp, Artificial Sequence
  Description of Artificial Sequence: Synthetic primer
actttgccgccta

SEQ ID NO: 4421 - DNA, 13 bp, Artificial Sequence
  Description of Artificial Sequence: Synthetic primer
tgtccagggacaa

SEQ ID NO: 4422 - DNA, 13 bp, Artificial Sequence
  Description of Artificial Sequence: Synthetic primer
ctttcgctgagct

SEQ ID NO: 4423 - DNA, 13 bp, Artificial Sequence
  Description of Artificial Sequence: Synthetic primer
tcagtatcggcga

SEQ ID NO: 4424 - DNA, 13 bp, Artificial Sequence
  Description of Artificial Sequence: Synthetic primer
cagcacatgaagc

SEQ ID NO: 4425 - DNA, 13 bp, Artificial Sequence
  Description of Artificial Sequence: Synthetic primer
ggtgagcgcatcc

SEQ ID NO: 4426 - DNA, 13 bp, Artificial Sequence
  Description of Artificial Sequence: Synthetic primer
ggccacagtgcca

SEQ ID NO: 4427 - DNA, 13 bp, Artificial Sequence
  Description of Artificial Sequence: Synthetic primer
tgccatagagttg

SEQ ID NO: 4428 - DNA, 13 bp, Artificial Sequence
  Description of Artificial Sequence: Synthetic primer
gcgcaccacatct

SEQ ID NO: 4429 - DNA, 13 bp, Artificial Sequence
  Description of Artificial Sequence: Synthetic primer
gccagcaggagat

SEQ ID NO: 4430 - DNA, 13 bp, Artificial Sequence
  Description of Artificial Sequence: Synthetic primer
atccttttcatag

SEQ ID NO: 4431 - DNA, 13 bp, Artificial Sequence
  Description of Artificial Sequence: Synthetic primer
acaagttcagcgt

SEQ ID NO: 4432 - DNA, 13 bp, Artificial Sequence
  Description of Artificial Sequence: Synthetic primer
ctcgcagaaccct

SEQ ID NO: 4433 - DNA, 13 bp, Artificial Sequence
  Description of Artificial Sequence: Synthetic primer
aacagccggagcc

SEQ ID NO: 4434 - DNA, 13 bp, Artificial Sequence
  Description of Artificial Sequence: Synthetic primer
aagtttaatggcc

SEQ ID NO: 4435 - DNA, 13 bp, Artificial Sequence
  Description of Artificial Sequence: Synthetic primer
cacagggaggaat

SEQ ID NO: 4436 - DNA, 13 bp, Artificial Sequence
  Description of Artificial Sequence: Synthetic primer
ttcgccaccggca

SEQ ID NO: 4437 - DNA, 13 bp, Artificial Sequence
  Description of Artificial Sequence: Synthetic primer
aatacgattgata

SEQ ID NO: 4438 - DNA, 13 bp, Artificial Sequence
  Description of Artificial Sequence: Synthetic primer
ctggctacgaccc

SEQ ID NO: 4439 - DNA, 13 bp, Artificial Sequence
  Description of Artificial Sequence: Synthetic primer
tctttgccaatga

SEQ ID NO: 4440 - DNA, 13 bp, Artificial Sequence
  Description of Artificial Sequence: Synthetic primer
ctctgcaaattcg

SEQ ID NO: 4441 - DNA, 13 bp, Artificial Sequence
  Description of Artificial Sequence: Synthetic primer
atgcacatccaat

SEQ ID NO: 4442 - DNA, 13 bp, Artificial Sequence
  Description of Artificial Sequence: Synthetic primer
aagagcactttca

SEQ ID NO: 4443 - DNA, 13 bp, Artificial Sequence
  Description of Artificial Sequence: Synthetic primer
ccctcggtgccta

SEQ ID NO: 4444 - DNA, 13 bp, Artificial Sequence
  Description of Artificial Sequence: Synthetic primer
acgttgcgtactg

SEQ ID NO: 4445 - DNA, 13 bp, Artificial Sequence
  Description of Artificial Sequence: Synthetic primer
cgtcctcggaaac

SEQ ID NO: 4446 - DNA, 13 bp, Artificial Sequence
  Description of Artificial Sequence: Synthetic primer
attatgctcaccc

SEQ ID NO: 4447 - DNA, 13 bp, Artificial Sequence
  Description of Artificial Sequence: Synthetic primer
ggcccaggttgtc

SEQ ID NO: 4448 - DNA, 13 bp, Artificial Sequence
  Description of Artificial Sequence: Synthetic primer
agccggtctattt

SEQ ID NO: 4449 - DNA, 13 bp, Artificial Sequence
  Description of Artificial Sequence: Synthetic primer
agtaggtcgcatt

SEQ ID NO: 4450 - DNA, 13 bp, Artificial Sequence
  Description of Artificial Sequence: Synthetic primer
tgatggtggcgtc

SEQ ID NO: 4451 - DNA, 13 bp, Artificial Sequence
  Description of Artificial Sequence: Synthetic primer
atcgatcgtctcg

SEQ ID NO: 4452 - DNA, 13 bp, Artificial Sequence
  Description of Artificial Sequence: Synthetic primer
gggaagagggtcc

SEQ ID NO: 4453 - DNA, 13 bp, Artificial Sequence
  Description of Artificial Sequence: Synthetic primer
accaggcgactta

SEQ ID NO: 4454 - DNA, 13 bp, Artificial Sequence
  Description of Artificial Sequence: Synthetic primer
aagcgcgggcatt

SEQ ID NO: 4455 - DNA, 13 bp, Artificial Sequence
  Description of Artificial Sequence: Synthetic primer
tggctgatgaaga

SEQ ID NO: 4456 - DNA, 13 bp, Artificial Sequence
  Description of Artificial Sequence: Synthetic primer
agccctgccactg

SEQ ID NO: 4457 - DNA, 13 bp, Artificial Sequence
  Description of Artificial Sequence: Synthetic primer
cacctcgaccttt

SEQ ID NO: 4458 - DNA, 13 bp, Artificial Sequence
  Description of Artificial Sequence: Synthetic primer
cgtcgaccttcac

SEQ ID NO: 4459 - DNA, 13 bp, Artificial Sequence
  Description of Artificial Sequence: Synthetic primer
cgttgctgttggc

SEQ ID NO: 4460 - DNA, 13 bp, Artificial Sequence
  Description of Artificial Sequence: Synthetic primer
tgatgaatcgcgt

SEQ ID NO: 4461 - DNA, 13 bp, Artificial Sequence
  Description of Artificial Sequence: Synthetic primer
tgatgcggttgga

SEQ ID NO: 4462 - DNA, 13 bp, Artificial Sequence
  Description of Artificial Sequence: Synthetic primer
gtgaacgacggat

SEQ ID NO: 4463 - DNA, 13 bp, Artificial Sequence
  Description of Artificial Sequence: Synthetic primer
gacaccttgaggt

SEQ ID NO: 4464 - DNA, 13 bp, Artificial Sequence
  Description of Artificial Sequence: Synthetic primer
gtattgatgtcag

SEQ ID NO: 4465 - DNA, 13 bp, Artificial Sequence
  Description of Artificial Sequence: Synthetic primer
gccacggcgaagt

SEQ ID NO: 4466 - DNA, 13 bp, Artificial Sequence
  Description of Artificial Sequence: Synthetic primer
accaaaccgttat

SEQ ID NO: 4467 - DNA, 13 bp, Artificial Sequence
  Description of Artificial Sequence: Synthetic primer
aatggaccaataa

SEQ ID NO: 4468 - DNA, 13 bp, Artificial Sequence
  Description of Artificial Sequence: Synthetic primer
gacagcctcgcac

SEQ ID NO: 4469 - DNA, 13 bp, Artificial Sequence
  Description of Artificial Sequence: Synthetic primer
gacagaaaagtat

SEQ ID NO: 4470 - DNA, 13 bp, Artificial Sequence
  Description of Artificial Sequence: Synthetic primer
tttacggtaaatt

SEQ ID NO: 4471 - DNA, 13 bp, Artificial Sequence
  Description of Artificial Sequence: Synthetic primer
gactggaaaggca

SEQ ID NO: 4472 - DNA, 13 bp, Artificial Sequence
  Description of Artificial Sequence: Synthetic primer
tctcaagggcatc

SEQ ID NO: 4473 - DNA, 13 bp, Artificial Sequence
  Description of Artificial Sequence: Synthetic primer
tcgccgacatggc

SEQ ID NO: 4474 - DNA, 13 bp, Artificial Sequence
  Description of Artificial Sequence: Synthetic primer
tagggaagcttat

SEQ ID NO: 4475 - DNA, 13 bp, Artificial Sequence
  Description of Artificial Sequence: Synthetic primer
ctggctgttttgg

SEQ ID NO: 4476 - DNA, 13 bp, Artificial Sequence
  Description of Artificial Sequence: Synthetic primer
ttggagggaattc

SEQ ID NO: 4477 - DNA, 13 bp, Artificial Sequence
  Description of Artificial Sequence: Synthetic primer
aaggttgttgttc

SEQ ID NO: 4478 - DNA, 13 bp, Artificial Sequence
  Description of Artificial Sequence: Synthetic primer
ttggtttctacac

SEQ ID NO: 4479 - DNA, 13 bp, Artificial Sequence
  Description of Artificial Sequence: Synthetic primer
actgggtgtgtct

SEQ ID NO: 4480 - DNA, 13 bp, Artificial Sequence
  Description of Artificial Sequence: Synthetic primer
tcaacgaacgcat

SEQ ID NO: 4481 - DNA, 13 bp, Artificial Sequence
  Description of Artificial Sequence: Synthetic primer
gtggacatctccc

SEQ ID NO: 4482 - DNA, 13 bp, Artificial Sequence
  Description of Artificial Sequence: Synthetic primer
ggagtttcttctg

SEQ ID NO: 4483 - DNA, 13 bp, Artificial Sequence
  Description of Artificial Sequence: Synthetic primer
gacggcgtgctct

SEQ ID NO: 4484 - DNA, 13 bp, Artificial Sequence
  Description of Artificial Sequence: Synthetic primer
cgagccgttcttg

SEQ ID NO: 4485 - DNA, 13 bp, Artificial Sequence
  Description of Artificial Sequence: Synthetic primer
tccggcaagttcg

SEQ ID NO: 4486 - DNA, 13 bp, Artificial Sequence
  Description of Artificial Sequence: Synthetic primer
ttgcatctgacgg

SEQ ID NO: 4487 - DNA, 13 bp, Artificial Sequence
  Description of Artificial Sequence: Synthetic primer
gggcattgacgtt

SEQ ID NO: 4488 - DNA, 13 bp, Artificial Sequence
  Description of Artificial Sequence: Synthetic primer
tattcaaggtttt

SEQ ID NO: 4489 - DNA, 13 bp, Artificial Sequence
  Description of Artificial Sequence: Synthetic primer
agcgcgatagtgc

SEQ ID NO: 4490 - DNA, 13 bp, Artificial Sequence
  Description of Artificial Sequence: Synthetic primer
accgtgcagcagc

SEQ ID NO: 4491 - DNA, 13 bp, Artificial Sequence
  Description of Artificial Sequence: Synthetic primer
ccatgatgtcatc

SEQ ID NO: 4492 - DNA, 13 bp, Artificial Sequence
  Description of Artificial Sequence: Synthetic primer
ctcggagcgctga

SEQ ID NO: 4493 - DNA, 13 bp, Artificial Sequence
  Description of Artificial Sequence: Synthetic primer
tccattatcttct

SEQ ID NO: 4494 - DNA, 13 bp, Artificial Sequence
  Description of Artificial Sequence: Synthetic primer
gaccaacccgaaa

SEQ ID NO: 4495 - DNA, 13 bp, Artificial Sequence
  Description of Artificial Sequence: Synthetic primer
tcaaaatagctat

SEQ ID NO: 4496 - DNA, 13 bp, Artificial Sequence
  Description of Artificial Sequence: Synthetic primer
gacgagattgtgc

SEQ ID NO: 4497 - DNA, 13 bp, Artificial Sequence
  Description of Artificial Sequence: Synthetic primer
cgaagtggcgaaa

SEQ ID NO: 4498 - DNA, 13 bp, Artificial Sequence
  Description of Artificial Sequence: Synthetic primer
tcatccgttgagg

SEQ ID NO: 4499 - DNA, 13 bp, Artificial Sequence
  Description of Artificial Sequence: Synthetic primer
gcaaacccgtatt

SEQ ID NO: 4500 - DNA, 13 bp, Artificial Sequence
  Description of Artificial Sequence: Synthetic primer
ggtaaccggcaat

SEQ ID NO: 4501 - DNA, 13 bp, Artificial Sequence
  Description of Artificial Sequence: Synthetic primer
ggccgtgagtttt

SEQ ID NO: 4502 - DNA, 13 bp, Artificial Sequence
  Description of Artificial Sequence: Synthetic primer
ggcatattctgtc

SEQ ID NO: 4503 - DNA, 13 bp, Artificial Sequence
  Description of Artificial Sequence: Synthetic primer
ccttgttcattat

SEQ ID NO: 4504 - DNA, 13 bp, Artificial Sequence
  Description of Artificial Sequence: Synthetic primer
ctcttcacttcgt

SEQ ID NO: 4505 - DNA, 13 bp, Artificial Sequence
  Description of Artificial Sequence: Synthetic primer
acttaaaagccga

SEQ ID NO: 4506 - DNA, 13 bp, Artificial Sequence
  Description of Artificial Sequence: Synthetic primer
aaagcgctctcta

SEQ ID NO: 4507 - DNA, 13 bp, Artificial Sequence
  Description of Artificial Sequence: Synthetic primer
aagtaccggtgag

SEQ ID NO: 4508 - DNA, 13 bp, Artificial Sequence
  Description of Artificial Sequence: Synthetic primer
acgtaccgattcg

SEQ ID NO: 4509 - DNA, 13 bp, Artificial Sequence
  Description of Artificial Sequence: Synthetic primer
gatttgaaatagc

SEQ ID NO: 4510 - DNA, 13 bp, Artificial Sequence
  Description of Artificial Sequence: Synthetic primer
cgtggcgctgatt

SEQ ID NO: 4511 - DNA, 13 bp, Artificial Sequence
  Description of Artificial Sequence: Synthetic primer
gccgggctgtcaa

SEQ ID NO: 4512 - DNA, 13 bp, Artificial Sequence
  Description of Artificial Sequence: Synthetic primer
ctcaggttgaggt

SEQ ID NO: 4513 - DNA, 13 bp, Artificial Sequence
  Description of Artificial Sequence: Synthetic primer
cgaaactacggtc

SEQ ID NO: 4514 - DNA, 13 bp, Artificial Sequence
  Description of Artificial Sequence: Synthetic primer
tcctgagtcatgt

SEQ ID NO: 4515 - DNA, 13 bp, Artificial Sequence
  Description of Artificial Sequence: Synthetic primer
gctcaacaaagga

SEQ ID NO: 4516 - DNA, 13 bp, Artificial Sequence
  Description of Artificial Sequence: Synthetic primer
aattgcagtcctg

SEQ ID NO: 4517 - DNA, 13 bp, Artificial Sequence
  Description of Artificial Sequence: Synthetic primer
gagagcgatttat

SEQ ID NO: 4518 - DNA, 13 bp, Artificial Sequence
  Description of Artificial Sequence: Synthetic primer
attgatacagcgt

SEQ ID NO: 4519 - DNA, 13 bp, Artificial Sequence
  Description of Artificial Sequence: Synthetic primer
actacagccgcgc

SEQ ID NO: 4520 - DNA, 13 bp, Artificial Sequence
  Description of Artificial Sequence: Synthetic primer
ctattccaatcac

SEQ ID NO: 4521 - DNA, 13 bp, Artificial Sequence
  Description of Artificial Sequence: Synthetic primer
ctttggcctcgat

SEQ ID NO: 4522 - DNA, 13 bp, Artificial Sequence
  Description of Artificial Sequence: Synthetic primer
catcgtccttgcg

SEQ ID NO: 4523 - DNA, 13 bp, Artificial Sequence
  Description of Artificial Sequence: Synthetic primer
ccaacacgcgacg

SEQ ID NO: 4524 - DNA, 13 bp, Artificial Sequence
  Description of Artificial Sequence: Synthetic primer
ccagtccccagta

SEQ ID NO: 4525 - DNA, 13 bp, Artificial Sequence
  Description of Artificial Sequence: Synthetic primer
atggcggtgcatc

SEQ ID NO: 4526 - DNA, 13 bp, Artificial Sequence
  Description of Artificial Sequence: Synthetic primer
gcgggcggttatt

SEQ ID NO: 4527 - DNA, 13 bp, Artificial Sequence
  Description of Artificial Sequence: Synthetic primer
tgcagatttccga

SEQ ID NO: 4528 - DNA, 13 bp, Artificial Sequence
  Description of Artificial Sequence: Synthetic primer
cgatttatccgct

SEQ ID NO: 4529 - DNA, 13 bp, Artificial Sequence
  Description of Artificial Sequence: Synthetic primer
gatttgcgtgttg

SEQ ID NO: 4530 - DNA, 13 bp, Artificial Sequence
  Description of Artificial Sequence: Synthetic primer
ttcgtcggtgttg

SEQ ID NO: 4531 - DNA, 13 bp, Artificial Sequence
  Description of Artificial Sequence: Synthetic primer
aactgggcgacaa

SEQ ID NO: 4532 - DNA, 13 bp, Artificial Sequence
  Description of Artificial Sequence: Synthetic primer
gatattgatcaat

SEQ ID NO: 4533 - DNA, 13 bp, Artificial Sequence
  Description of Artificial Sequence: Synthetic primer
ggtggcggtcagt

SEQ ID NO: 4534 - DNA, 13 bp, Artificial Sequence
  Description of Artificial Sequence: Synthetic primer
cggtgacgttcac

SEQ ID NO: 4535 - DNA, 13 bp, Artificial Sequence
  Description of Artificial Sequence: Synthetic primer
aattacagcttga

SEQ ID NO: 4536 - DNA, 13 bp, Artificial Sequence
  Description of Artificial Sequence: Synthetic primer
ttcgataatgcgg

SEQ ID NO: 4537 - DNA, 13 bp, Artificial Sequence
  Description of Artificial Sequence: Synthetic primer
agtcgctgtttaa

SEQ ID NO: 4538 - DNA, 13 bp, Artificial Sequence
  Description of Artificial Sequence: Synthetic primer
ccagacgccgcat

SEQ ID NO: 4539 - DNA, 13 bp, Artificial Sequence
  Description of Artificial Sequence: Synthetic primer
atcaggaaaccaa

SEQ ID NO: 4540 - DNA, 13 bp, Artificial Sequence
  Description of Artificial Sequence: Synthetic primer
catgctgacgatg

SEQ ID NO: 4541 - DNA, 13 bp, Artificial Sequence
  Description of Artificial Sequence: Synthetic primer
cttttcgatagga

SEQ ID NO: 4542 - DNA, 13 bp, Artificial Sequence
  Description of Artificial Sequence: Synthetic primer
tcagccaacgcat

SEQ ID NO: 4543 - DNA, 13 bp, Artificial Sequence
  Description of Artificial Sequence: Synthetic primer
gaacggtttcgcc

SEQ ID NO: 4544 - DNA, 13 bp, Artificial Sequence
  Description of Artificial Sequence: Synthetic primer
ctcccgcgtgatc

SEQ ID NO: 4545 - DNA, 13 bp, Artificial Sequence
  Description of Artificial Sequence: Synthetic primer
gcaaggcgttcgc

SEQ ID NO: 4546 - DNA, 13 bp, Artificial Sequence
  Description of Artificial Sequence: Synthetic primer
cttcagttactgc

SEQ ID NO: 4547 - DNA, 13 bp, Artificial Sequence
  Description of Artificial Sequence: Synthetic primer
aggtacacacggc

SEQ ID NO: 4548 - DNA, 13 bp, Artificial Sequence
  Description of Artificial Sequence: Synthetic primer
atgccgccgtcag

SEQ ID NO: 4549 - DNA, 13 bp, Artificial Sequence
  Description of Artificial Sequence: Synthetic primer
ttggcaccggagc

SEQ ID NO: 4550 - DNA, 13 bp, Artificial Sequence
  Description of Artificial Sequence: Synthetic primer
acgcttcgttgct

SEQ ID NO: 4551 - DNA, 13 bp, Artificial Sequence
  Description of Artificial Sequence: Synthetic primer
tgcttgcagaagc

SEQ ID NO: 4552 - DNA, 13 bp, Artificial Sequence
  Description of Artificial Sequence: Synthetic primer
aatacaaccatta

SEQ ID NO: 4553 - DNA, 13 bp, Artificial Sequence
  Description of Artificial Sequence: Synthetic primer
ctgtcgcgctcga

SEQ ID NO: 4554 - DNA, 13 bp, Artificial Sequence
  Description of Artificial Sequence: Synthetic primer
cttaggaaggatg

SEQ ID NO: 4555 - DNA, 13 bp, Artificial Sequence
  Description of Artificial Sequence: Synthetic primer
tgaccctactgaa

SEQ ID NO: 4556 - DNA, 13 bp, Artificial Sequence
  Description of Artificial Sequence: Synthetic primer
tatgtggtaatct

SEQ ID NO: 4557 - DNA, 13 bp, Artificial Sequence
  Description of Artificial Sequence: Synthetic primer
gacaccagcttcg

SEQ ID NO: 4558 - DNA, 13 bp, Artificial Sequence
  Description of Artificial Sequence: Synthetic primer
ggtagtggtgtcg

SEQ ID NO: 4559 - DNA, 13 bp, Artificial Sequence
  Description of Artificial Sequence: Synthetic primer
ccaactcctccat

SEQ ID NO: 4560 - DNA, 13 bp, Artificial Sequence
  Description of Artificial Sequence: Synthetic primer
acaacgtttgctg

SEQ ID NO: 4561 - DNA, 13 bp, Artificial Sequence
  Description of Artificial Sequence: Synthetic primer
cgttgctgcgctt

SEQ ID NO: 4562 - DNA, 13 bp, Artificial Sequence
  Description of Artificial Sequence: Synthetic primer
atagacaatactt

SEQ ID NO: 4563 - DNA, 13 bp, Artificial Sequence
  Description of Artificial Sequence: Synthetic primer
gatccttgcgcaa

SEQ ID NO: 4564 - DNA, 13 bp, Artificial Sequence
  Description of Artificial Sequence: Synthetic primer
caagctttgcact

SEQ ID NO: 4565 - DNA, 13 bp, Artificial Sequence
  Description of Artificial Sequence: Synthetic primer
cagatagttcgcc

SEQ ID NO: 4566 - DNA, 13 bp, Artificial Sequence
  Description of Artificial Sequence: Synthetic primer
actctcgcgagtt

SEQ ID NO: 4567 - DNA, 13 bp, Artificial Sequence
  Description of Artificial Sequence: Synthetic primer
agaaaacaatcag

SEQ ID NO: 4568 - DNA, 13 bp, Artificial Sequence
  Description of Artificial Sequence: Synthetic primer
agatgttgcacgt

SEQ ID NO: 4569 - DNA, 13 bp, Artificial Sequence
  Description of Artificial Sequence: Synthetic primer
ggatatgggcacg

SEQ ID NO: 4570 - DNA, 13 bp, Artificial Sequence
  Description of Artificial Sequence: Synthetic primer
atcgatcacggcg

SEQ ID NO: 4571 - DNA, 13 bp, Artificial Sequence
  Description of Artificial Sequence: Synthetic primer
aatgtgactcaaa

SEQ ID NO: 4572 - DNA, 13 bp, Artificial Sequence
  Description of Artificial Sequence: Synthetic primer
tttaaagcgggca

SEQ ID NO: 4573 - DNA, 13 bp, Artificial Sequence
  Description of Artificial Sequence: Synthetic primer
aaattctgtcgtt

SEQ ID NO: 4574 - DNA, 13 bp, Artificial Sequence
  Description of Artificial Sequence: Synthetic primer
taataaccttgat

SEQ ID NO: 4575 - DNA, 13 bp, Artificial Sequence
  Description of Artificial Sequence: Synthetic primer
gatctttatcatg

SEQ ID NO: 4576 - DNA, 13 bp, Artificial Sequence
  Description of Artificial Sequence: Synthetic primer
atggtggtgatgc

SEQ ID NO: 4577 - DNA, 13 bp, Artificial Sequence
  Description of Artificial Sequence: Synthetic primer
aatgcagtgcggc

SEQ ID NO: 4578 - DNA, 13 bp, Artificial Sequence
  Description of Artificial Sequence: Synthetic primer
ctccaaatggatt

SEQ ID NO: 4579 - DNA, 13 bp, Artificial Sequence
  Description of Artificial Sequence: Synthetic primer
accaccccattcg

SEQ ID NO: 4580 - DNA, 13 bp, Artificial Sequence
  Description of Artificial Sequence: Synthetic primer
atcacttataacc

SEQ ID NO: 4581 - DNA, 13 bp, Artificial Sequence
  Description of Artificial Sequence: Synthetic primer
aagagctcaaaac

SEQ ID NO: 4582 - DNA, 13 bp, Artificial Sequence
  Description of Artificial Sequence: Synthetic primer
gatgtcggcaagg

SEQ ID NO: 4583 - DNA, 13 bp, Artificial Sequence
  Description of Artificial Sequence: Synthetic primer
aatcttattgacc

SEQ ID NO: 4584 - DNA, 13 bp, Artificial Sequence
  Description of Artificial Sequence: Synthetic primer
cgccttcggtcac

SEQ ID NO: 4585 - DNA, 13 bp, Artificial Sequence
  Description of Artificial Sequence: Synthetic primer
tgggaaatggtgg

SEQ ID NO: 4586 - DNA, 13 bp, Artificial Sequence
  Description of Artificial Sequence: Synthetic primer
gccgtcatgctcc

SEQ ID NO: 4587 - DNA, 13 bp, Artificial Sequence
  Description of Artificial Sequence: Synthetic primer
cccagagacgagg

SEQ ID NO: 4588 - DNA, 13 bp, Artificial Sequence
  Description of Artificial Sequence: Synthetic primer
ttcgagccatgct

SEQ ID NO: 4589 - DNA, 13 bp, Artificial Sequence
  Description of Artificial Sequence: Synthetic primer
ctgaagttgaccg

SEQ ID NO: 4590 - DNA, 13 bp, Artificial Sequence
  Description of Artificial Sequence: Synthetic primer
tgtcgctgatggc

SEQ ID NO: 4591 - DNA, 13 bp, Artificial Sequence
  Description of Artificial Sequence: Synthetic primer
ctaatattcccta

SEQ ID NO: 4592 - DNA, 13 bp, Artificial Sequence
  Description of Artificial Sequence: Synthetic primer
cttatggcattac

SEQ ID NO: 4593 - DNA, 13 bp, Artificial Sequence
  Description of Artificial Sequence: Synthetic primer
accttcagatata

SEQ ID NO: 4594 - DNA, 13 bp, Artificial Sequence
  Description of Artificial Sequence: Synthetic primer
ggtctctttatcg

SEQ ID NO: 4595 - DNA, 13 bp, Artificial Sequence
  Description of Artificial Sequence: Synthetic primer
caatagcagtgaa

SEQ ID NO: 4596 - DNA, 13 bp, Artificial Sequence
  Description of Artificial Sequence: Synthetic primer
tggacgtacgtaa

SEQ ID NO: 4597 - DNA, 13 bp, Artificial Sequence
  Description of Artificial Sequence: Synthetic primer
cccgatgtcattc

SEQ ID NO: 4598 - DNA, 13 bp, Artificial Sequence
  Description of Artificial Sequence: Synthetic primer
tgtgtttagaatg

SEQ ID NO: 4599 - DNA, 13 bp, Artificial Sequence
  Description of Artificial Sequence: Synthetic primer
gatgccgctaacg

SEQ ID NO: 4600 - DNA, 13 bp, Artificial Sequence
  Description of Artificial Sequence: Synthetic primer
ggggagtagcagc

SEQ ID NO: 4601 - DNA, 13 bp, Artificial Sequence
  Description of Artificial Sequence: Synthetic primer
catattcctttca

SEQ ID NO: 4602 - DNA, 13 bp, Artificial Sequence
  Description of Artificial Sequence: Synthetic primer
ctggcaacctaca

SEQ ID NO: 4603 - DNA, 13 bp, Artificial Sequence
  Description of Artificial Sequence: Synthetic primer
agtagtcaaccac

SEQ ID NO: 4604 - DNA, 13 bp, Artificial Sequence
  Description of Artificial Sequence: Synthetic primer
tcgtgggatatac

SEQ ID NO: 4605 - DNA, 13 bp, Artificial Sequence
  Description of Artificial Sequence: Synthetic primer
gagaatatctgcc

SEQ ID NO: 4606 - DNA, 13 bp, Artificial Sequence
  Description of Artificial Sequence: Synthetic primer
tgagtattggcgc

SEQ ID NO: 4607 - DNA, 13 bp, Artificial Sequence
  Description of Artificial Sequence: Synthetic primer
tcagcgcctccct

SEQ ID NO: 4608 - DNA, 13 bp, Artificial Sequence
  Description of Artificial Sequence: Synthetic primer
gtgtgattgcagc

SEQ ID NO: 4609 - DNA, 13 bp, Artificial Sequence
  Description of Artificial Sequence: Synthetic primer
cgctaatacgatc

SEQ ID NO: 4610 - DNA, 13 bp, Artificial Sequence
  Description of Artificial Sequence: Synthetic primer
gtaatgtatctgt

SEQ ID NO: 4611 - DNA, 13 bp, Artificial Sequence
  Description of Artificial Sequence: Synthetic primer
atgtaccagggat

SEQ ID NO: 4612 - DNA, 13 bp, Artificial Sequence
  Description of Artificial Sequence: Synthetic primer
gaagagtgcgtag

SEQ ID NO: 4613 - DNA, 13 bp, Artificial Sequence
  Description of Artificial Sequence: Synthetic primer
gctggtgaacagg

SEQ ID NO: 4614 - DNA, 13 bp, Artificial Sequence
  Description of Artificial Sequence: Synthetic primer
ggttcagcgtaag

SEQ ID NO: 4615 - DNA, 13 bp, Artificial Sequence
  Description of Artificial Sequence: Synthetic primer
ttgatgtactttc

SEQ ID NO: 4616 - DNA, 13 bp, Artificial Sequence
  Description of Artificial Sequence: Synthetic primer
gagcgggtgctat

SEQ ID NO: 4617 - DNA, 13 bp, Artificial Sequence
  Description of Artificial Sequence: Synthetic primer
atggtcgccggct

SEQ ID NO: 4618 - DNA, 13 bp, Artificial Sequence
  Description of Artificial Sequence: Synthetic primer
gcgtaccattgtt

SEQ ID NO: 4619 - DNA, 13 bp, Artificial Sequence
  Description of Artificial Sequence: Synthetic primer
tccactcgaaccg

SEQ ID NO: 4620 - DNA, 13 bp, Artificial Sequence
  Description of Artificial Sequence: Synthetic primer
gaccaccacgcac

SEQ ID NO: 4621 - DNA, 13 bp, Artificial Sequence
  Description of Artificial Sequence: Synthetic primer
tccctggcgatcg

SEQ ID NO: 4622 - DNA, 13 bp, Artificial Sequence
  Description of Artificial Sequence: Synthetic primer
tcgtccttgatca

SEQ ID NO: 4623 - DNA, 13 bp, Artificial Sequence
  Description of Artificial Sequence: Synthetic primer
gttcggtgaatat

SEQ ID NO: 4624 - DNA, 13 bp, Artificial Sequence
  Description of Artificial Sequence: Synthetic primer
caccacgcaaaag

SEQ ID NO: 4625 - DNA, 13 bp, Artificial Sequence
  Description of Artificial Sequence: Synthetic primer
tcgcgacctgaaa

SEQ ID NO: 4626 - DNA, 13 bp, Artificial Sequence
  Description of Artificial Sequence: Synthetic primer
cgtcgtgtgcgct

SEQ ID NO: 4627 - DNA, 13 bp, Artificial Sequence
  Description of Artificial Sequence: Synthetic primer
tgaaccatgggga

SEQ ID NO: 4628 - DNA, 13 bp, Artificial Sequence
  Description of Artificial Sequence: Synthetic primer
cagtgagtttatg

SEQ ID NO: 4629 - DNA, 13 bp, Artificial Sequence
  Description of Artificial Sequence: Synthetic primer
aaagcgtcttgcg

SEQ ID NO: 4630 - DNA, 13 bp, Artificial Sequence
  Description of Artificial Sequence: Synthetic primer
atcagtgataaag

SEQ ID NO: 4631 - DNA, 13 bp, Artificial Sequence
  Description of Artificial Sequence: Synthetic primer
agcaatcccgcca

SEQ ID NO: 4632 - DNA, 13 bp, Artificial Sequence
  Description of Artificial Sequence: Synthetic primer
aaaacggcgattt

SEQ ID NO: 4633 - DNA, 13 bp, Artificial Sequence
  Description of Artificial Sequence: Synthetic primer
ttatctggtgatc

SEQ ID NO: 4634 - DNA, 13 bp, Artificial Sequence
  Description of Artificial Sequence: Synthetic primer
tcacggcggattt

SEQ ID NO: 4635 - DNA, 13 bp, Artificial Sequence
  Description of Artificial Sequence: Synthetic primer
agcatcttttact

SEQ ID NO: 4636 - DNA, 13 bp, Artificial Sequence
  Description of Artificial Sequence: Synthetic primer
ttctgtttcaggc

SEQ ID NO: 4637 - DNA, 13 bp, Artificial Sequence
  Description of Artificial Sequence: Synthetic primer
gggtctgctcatt

SEQ ID NO: 4638 - DNA, 13 bp, Artificial Sequence
  Description of Artificial Sequence: Synthetic primer
gacctgcctcatc

SEQ ID NO: 4639 - DNA, 13 bp, Artificial Sequence
  Description of Artificial Sequence: Synthetic primer
tgcgcaatatccg

SEQ ID NO: 4640 - DNA, 13 bp, Artificial Sequence
  Description of Artificial Sequence: Synthetic primer
caaatgtaaagcg

SEQ ID NO: 4641 - DNA, 13 bp, Artificial Sequence
  Description of Artificial Sequence: Synthetic primer
ttagcttcaattc

SEQ ID NO: 4642 - DNA, 13 bp, Artificial Sequence
  Description of Artificial Sequence: Synthetic primer
acagcagactata

SEQ ID NO: 4643 - DNA, 13 bp, Artificial Sequence
  Description of Artificial Sequence: Synthetic primer
gtggtatcacgtg

SEQ ID NO: 4644 - DNA, 13 bp, Artificial Sequence
  Description of Artificial Sequence: Synthetic primer
cttttgagtcaat

SEQ ID NO: 4645 - DNA, 13 bp, Artificial Sequence
  Description of Artificial Sequence: Synthetic primer
ggttacccgcttc

SEQ ID NO: 4646 - DNA, 13 bp, Artificial Sequence
  Description of Artificial Sequence: Synthetic primer
tagaaatcctttg

SEQ ID NO: 4647 - DNA, 13 bp, Artificial Sequence
  Description of Artificial Sequence: Synthetic primer
accaattgttcca

SEQ ID NO: 4648 - DNA, 13 bp, Artificial Sequence
  Description of Artificial Sequence: Synthetic primer
cttcatccatcgc

SEQ ID NO: 4649 - DNA, 13 bp, Artificial Sequence
  Description of Artificial Sequence: Synthetic primer
cttgaagaaattc

SEQ ID NO: 4650 - DNA, 13 bp, Artificial Sequence
  Description of Artificial Sequence: Synthetic primer
cgctcatggagct

SEQ ID NO: 4651 - DNA, 13 bp, Artificial Sequence
  Description of Artificial Sequence: Synthetic primer
gtttattggctca

SEQ ID NO: 4652 - DNA, 13 bp, Artificial Sequence
  Description of Artificial Sequence: Synthetic primer
caacggaagcgtt

SEQ ID NO: 4653 - DNA, 13 bp, Artificial Sequence
  Description of Artificial Sequence: Synthetic primer
gatacatccccgg

SEQ ID NO: 4654 - DNA, 13 bp, Artificial Sequence
  Description of Artificial Sequence: Synthetic primer
gtagtgccactgg

SEQ ID NO: 4655 - DNA, 13 bp, Artificial Sequence
  Description of Artificial Sequence: Synthetic primer
tgtttccttttgc

SEQ ID NO: 4656 - DNA, 13 bp, Artificial Sequence
  Description of Artificial Sequence: Synthetic primer
ggacaaggcggta

SEQ ID NO: 4657 - DNA, 13 bp, Artificial Sequence
  Description of Artificial Sequence: Synthetic primer
aacctcggcgaga

SEQ ID NO: 4658 - DNA, 13 bp, Artificial Sequence
  Description of Artificial Sequence: Synthetic primer
ctctatatcttca

SEQ ID NO: 4659 - DNA, 13 bp, Artificial Sequence
  Description of Artificial Sequence: Synthetic primer
tgcctatagagta

SEQ ID NO: 4660 - DNA, 13 bp, Artificial Sequence
  Description of Artificial Sequence: Synthetic primer
gacgccgaactcg

SEQ ID NO: 4661 - DNA, 13 bp, Artificial Sequence
  Description of Artificial Sequence: Synthetic primer
ctcattgagcacc

SEQ ID NO: 4662 - DNA, 13 bp, Artificial Sequence
  Description of Artificial Sequence: Synthetic primer
tcgtggtattcac

SEQ ID NO: 4663 - DNA, 13 bp, Artificial Sequence
  Description of Artificial Sequence: Synthetic primer
tacagcaactcga

SEQ ID NO: 4664 - DNA, 13 bp, Artificial Sequence
  Description of Artificial Sequence: Synthetic primer
cagcgggaactgg

SEQ ID NO: 4665 - DNA, 13 bp, Artificial Sequence
  Description of Artificial Sequence: Synthetic primer
gtatgaccttgga

SEQ ID NO: 4666 - DNA, 13 bp, Artificial Sequence
  Description of Artificial Sequence: Synthetic primer
tggttttgccgga

SEQ ID NO: 4667 - DNA, 13 bp, Artificial Sequence
  Description of Artificial Sequence: Synthetic primer
aagaggaaagttc

SEQ ID NO: 4668 - DNA, 13 bp, Artificial Sequence
  Description of Artificial Sequence: Synthetic primer
aaaatgtgttttc

SEQ ID NO: 4669 - DNA, 13 bp, Artificial Sequence
  Description of Artificial Sequence: Synthetic primer
acaacgtctggac

SEQ ID NO: 4670 - DNA, 13 bp, Artificial Sequence
  Description of Artificial Sequence: Synthetic primer
taatcgttataac

SEQ ID NO: 4671 - DNA, 13 bp, Artificial Sequence
  Description of Artificial Sequence: Synthetic primer
tcgaggccaccct

SEQ ID NO: 4672 - DNA, 13 bp, Artificial Sequence
  Description of Artificial Sequence: Synthetic primer
tgccattcttcga

SEQ ID NO: 4673 - DNA, 13 bp, Artificial Sequence
  Description of Artificial Sequence: Synthetic primer
cggcttgagcgct

SEQ ID NO: 4674 - DNA, 13 bp, Artificial Sequence
  Description of Artificial Sequence: Synthetic primer
cttgataccttag

SEQ ID NO: 4675 - DNA, 13 bp, Artificial Sequence
  Description of Artificial Sequence: Synthetic primer
agtatgaaatact

SEQ ID NO: 4676 - DNA, 13 bp, Artificial Sequence
  Description of Artificial Sequence: Synthetic primer
tatgtgggagaaa

SEQ ID NO: 4677 - DNA, 13 bp, Artificial Sequence
  Description of Artificial Sequence: Synthetic primer
tcgtggtaatgcc

SEQ ID NO: 4678 - DNA, 13 bp, Artificial Sequence
  Description of Artificial Sequence: Synthetic primer
gcagtctttgtgc

SEQ ID NO: 4679 - DNA, 13 bp, Artificial Sequence
  Description of Artificial Sequence: Synthetic primer
tctcgggcatcca

SEQ ID NO: 4680 - DNA, 13 bp, Artificial Sequence
  Description of Artificial Sequence: Synthetic primer
acttctataaggt

SEQ ID NO: 4681 - DNA, 13 bp, Artificial Sequence
  Description of Artificial Sequence: Synthetic primer
gtcaccattgttg

SEQ ID NO: 4682 - DNA, 13 bp, Artificial Sequence
  Description of Artificial Sequence: Synthetic primer
gaacgtcgaaagc

SEQ ID NO: 4683 - DNA, 13 bp, Artificial Sequence
  Description of Artificial Sequence: Synthetic primer
tcctgatcgccag

SEQ ID NO: 4684 - DNA, 13 bp, Artificial Sequence
  Description of Artificial Sequence: Synthetic primer
tcatctggaaatg

SEQ ID NO: 4685 - DNA, 13 bp, Artificial Sequence
  Description of Artificial Sequence: Synthetic primer
gctggtattagct

SEQ ID NO: 4686 - DNA, 13 bp, Artificial Sequence
  Description of Artificial Sequence: Synthetic primer
gcgaagcatcctg

SEQ ID NO: 4687 - DNA, 13 bp, Artificial Sequence
  Description of Artificial Sequence: Synthetic primer
tctacagccttga

SEQ ID NO: 4688 - DNA, 13 bp, Artificial Sequence
  Description of Artificial Sequence: Synthetic primer
tcggcatcgtgca

SEQ ID NO: 4689 - DNA, 13 bp, Artificial Sequence
  Description of Artificial Sequence: Synthetic primer
acatcgggtattt

SEQ ID NO: 4690 - DNA, 13 bp, Artificial Sequence
  Description of Artificial Sequence: Synthetic primer
cttttcgtttcat

SEQ ID NO: 4691 - DNA, 13 bp, Artificial Sequence
  Description of Artificial Sequence: Synthetic primer
ggtctggctgcta

SEQ ID NO: 4692 - DNA, 13 bp, Artificial Sequence
  Description of Artificial Sequence: Synthetic primer
cgatgacctggac

SEQ ID NO: 4693 - DNA, 13 bp, Artificial Sequence
  Description of Artificial Sequence: Synthetic primer
aagtatggtctat

SEQ ID NO: 4694 - DNA, 13 bp, Artificial Sequence
  Description of Artificial Sequence: Synthetic primer
acaaacatcggat

SEQ ID NO: 4695 - DNA, 13 bp, Artificial Sequence
  Description of Artificial Sequence: Synthetic primer
ccaccacaaagaa

SEQ ID NO: 4696 - DNA, 13 bp, Artificial Sequence
  Description of Artificial Sequence: Synthetic primer
ggccatgacggtg

SEQ ID NO: 4697 - DNA, 13 bp, Artificial Sequence
  Description of Artificial Sequence: Synthetic primer
tggccgaggcgat

SEQ ID NO: 4698 - DNA, 13 bp, Artificial Sequence
  Description of Artificial Sequence: Synthetic primer
cgaaagcccattc

SEQ ID NO: 4699 - DNA, 13 bp, Artificial Sequence
  Description of Artificial Sequence: Synthetic primer
ttccagcatccgg

SEQ ID NO: 4700 - DNA, 13 bp, Artificial Sequence
  Description of Artificial Sequence: Synthetic primer
tcaggacaatgct

SEQ ID NO: 4701 - DNA, 13 bp, Artificial Sequence
  Description of Artificial Sequence: Synthetic primer
tgttcaatctact

SEQ ID NO: 4702 - DNA, 13 bp, Artificial Sequence
  Description of Artificial Sequence: Synthetic primer
gtcagcagggtct

SEQ ID NO: 4703 - DNA, 13 bp, Artificial Sequence
  Description of Artificial Sequence: Synthetic primer
tacctagctatag

SEQ ID NO: 4704 - DNA, 13 bp, Artificial Sequence
  Description of Artificial Sequence: Synthetic primer
agatagataaggc

SEQ ID NO: 4705 - DNA, 13 bp, Artificial Sequence
  Description of Artificial Sequence: Synthetic primer
accgacagagcgg

SEQ ID NO: 4706 - DNA, 13 bp, Artificial Sequence
  Description of Artificial Sequence: Synthetic primer
atccaaagcgcac

SEQ ID NO: 4707 - DNA, 13 bp, Artificial Sequence
  Description of Artificial Sequence: Synthetic primer
gcaacgatgtctg

SEQ ID NO: 4708 - DNA, 13 bp, Artificial Sequence
  Description of Artificial Sequence: Synthetic primer
agcatcccgacct

SEQ ID NO: 4709 - DNA, 13 bp, Artificial Sequence
  Description of Artificial Sequence: Synthetic primer
gacgtttatcccc

SEQ ID NO: 4710 - DNA, 13 bp, Artificial Sequence
  Description of Artificial Sequence: Synthetic primer
tttgggtcaagtt

SEQ ID NO: 4711 - DNA, 13 bp, Artificial Sequence
  Description of Artificial Sequence: Synthetic primer
aagatttcttgtt

SEQ ID NO: 4712 - DNA, 13 bp, Artificial Sequence
  Description of Artificial Sequence: Synthetic primer
agggcttttactg

SEQ ID NO: 4713 - DNA, 13 bp, Artificial Sequence
  Description of Artificial Sequence: Synthetic primer
tcggccttctgcg

SEQ ID NO: 4714 - DNA, 13 bp, Artificial Sequence
  Description of Artificial Sequence: Synthetic primer
ttctcacggaatc

SEQ ID NO: 4715 - DNA, 13 bp, Artificial Sequence
  Description of Artificial Sequence: Synthetic primer
caggcgcgacgaa

SEQ ID NO: 4716 - DNA, 13 bp, Artificial Sequence
  Description of Artificial Sequence: Synthetic primer
agactatcgttaa

SEQ ID NO: 4717 - DNA, 13 bp, Artificial Sequence
  Description of Artificial Sequence: Synthetic primer
acctatctgcagg

SEQ ID NO: 4718 - DNA, 13 bp, Artificial Sequence
  Description of Artificial Sequence: Synthetic primer
atgctgtccgtgt

SEQ ID NO: 4719 - DNA, 13 bp, Artificial Sequence
  Description of Artificial Sequence: Synthetic primer
atctgtttagcta

SEQ ID NO: 4720 - DNA, 13 bp, Artificial Sequence
  Description of Artificial Sequence: Synthetic primer
gttcgctcccgct

SEQ ID NO: 4721 - DNA, 13 bp, Artificial Sequence
  Description of Artificial Sequence: Synthetic primer
tccgcgacaatgg

SEQ ID NO: 4722 - DNA, 13 bp, Artificial Sequence
  Description of Artificial Sequence: Synthetic primer
cgaataccgttcc

SEQ ID NO: 4723 - DNA, 13 bp, Artificial Sequence
  Description of Artificial Sequence: Synthetic primer
ccatgccgatggg

SEQ ID NO: 4724 - DNA, 13 bp, Artificial Sequence
  Description of Artificial Sequence: Synthetic primer
aatgcgcagttgc

SEQ ID NO: 4725 - DNA, 13 bp, Artificial Sequence
  Description of Artificial Sequence: Synthetic primer
ttcctccaatcgg

SEQ ID NO: 4726 - DNA, 13 bp, Artificial Sequence
  Description of Artificial Sequence: Synthetic primer
gccatctgattga

SEQ ID NO: 4727 - DNA, 13 bp, Artificial Sequence
  Description of Artificial Sequence: Synthetic primer
taaacccgctgtc

SEQ ID NO: 4728 - DNA, 13 bp, Artificial Sequence
  Description of Artificial Sequence: Synthetic primer
atcgtaaaagtct

SEQ ID NO: 4729 - DNA, 13 bp, Artificial Sequence
  Description of Artificial Sequence: Synthetic primer
atgttcaatatca

SEQ ID NO: 4730 - DNA, 13 bp, Artificial Sequence
  Description of Artificial Sequence: Synthetic primer
ctcaactatcaga

SEQ ID NO: 4731 - DNA, 13 bp, Artificial Sequence
  Description of Artificial Sequence: Synthetic primer
tcaatgtcatttt

SEQ ID NO: 4732 - DNA, 13 bp, Artificial Sequence
  Description of Artificial Sequence: Synthetic primer
gcagcgtgaggat

SEQ ID NO: 4733 - DNA, 13 bp, Artificial Sequence
  Description of Artificial Sequence: Synthetic primer
cgttaagctgctg

SEQ ID NO: 4734 - DNA, 13 bp, Artificial Sequence
  Description of Artificial Sequence: Synthetic primer
ggtaactatattt

SEQ ID NO: 4735 - DNA, 13 bp, Artificial Sequence
  Description of Artificial Sequence: Synthetic primer
ttcccggtggtat

SEQ ID NO: 4736 - DNA, 13 bp, Artificial Sequence
  Description of Artificial Sequence: Synthetic primer
tgtccatgcaagc

SEQ ID NO: 4737 - DNA, 13 bp, Artificial Sequence
  Description of Artificial Sequence: Synthetic primer
tatctccgggatc

SEQ ID NO: 4738 - DNA, 13 bp, Artificial Sequence
  Description of Artificial Sequence: Synthetic primer
gagaacccaaagg

SEQ ID NO: 4739 - DNA, 13 bp, Artificial Sequence
  Description of Artificial Sequence: Synthetic primer
aacctcaaggtgt

SEQ ID NO: 4740 - DNA, 13 bp, Artificial Sequence
  Description of Artificial Sequence: Synthetic primer
tccggcacgttgc

SEQ ID NO: 4741 - DNA, 13 bp, Artificial Sequence
  Description of Artificial Sequence: Synthetic primer
atattccttacca

SEQ ID NO: 4742 - DNA, 13 bp, Artificial Sequence
  Description of Artificial Sequence: Synthetic primer
aatctacgctgat

SEQ ID NO: 4743 - DNA, 13 bp, Artificial Sequence
  Description of Artificial Sequence: Synthetic primer
ggcgggatcaacc

SEQ ID NO: 4744 - DNA, 13 bp, Artificial Sequence
  Description of Artificial Sequence: Synthetic primer
cgaggccatcgag

SEQ ID NO: 4745 - DNA, 13 bp, Artificial Sequence
  Description of Artificial Sequence: Synthetic primer
aacatgatattgc

SEQ ID NO: 4746 - DNA, 13 bp, Artificial Sequence
  Description of Artificial Sequence: Synthetic primer
agtaagtcaacaa

SEQ ID NO: 4747 - DNA, 13 bp, Artificial Sequence
  Description of Artificial Sequence: Synthetic primer
gccacggtcggtt

SEQ ID NO: 4748 - DNA, 13 bp, Artificial Sequence
  Description of Artificial Sequence: Synthetic primer
ggtcttcgtaagc

SEQ ID NO: 4749 - DNA, 13 bp, Artificial Sequence
  Description of Artificial Sequence: Synthetic primer
attgaccgagcat

SEQ ID NO: 4750 - DNA, 13 bp, Artificial Sequence
  Description of Artificial Sequence: Synthetic primer
atagtgtggcata

SEQ ID NO: 4751 - DNA, 13 bp, Artificial Sequence
  Description of Artificial Sequence: Synthetic primer
ggaacaagcaata

SEQ ID NO: 4752 - DNA, 13 bp, Artificial Sequence
  Description of Artificial Sequence: Synthetic primer
agttcagggactt

SEQ ID NO: 4753 - DNA, 13 bp, Artificial Sequence
  Description of Artificial Sequence: Synthetic primer
attatcagttaga

SEQ ID NO: 4754 - DNA, 13 bp, Artificial Sequence
  Description of Artificial Sequence: Synthetic primer
ctcctgtctcctt

SEQ ID NO: 4755 - DNA, 13 bp, Artificial Sequence
  Description of Artificial Sequence: Synthetic primer
cagtcatcccact

SEQ ID NO: 4756 - DNA, 13 bp, Artificial Sequence
  Description of Artificial Sequence: Synthetic primer
atcgcagggaaca

SEQ ID NO: 4757 - DNA, 13 bp, Artificial Sequence
  Description of Artificial Sequence: Synthetic primer
atcgacaacacgg

SEQ ID NO: 4758 - DNA, 13 bp, Artificial Sequence
  Description of Artificial Sequence: Synthetic primer
gaccttcctcctc

SEQ ID NO: 4759 - DNA, 13 bp, Artificial Sequence
  Description of Artificial Sequence: Synthetic primer
tgcggcgcaattg

SEQ ID NO: 4760 - DNA, 13 bp, Artificial Sequence
  Description of Artificial Sequence: Synthetic primer
agcttccaggccg

SEQ ID NO: 4761 - DNA, 13 bp, Artificial Sequence
  Description of Artificial Sequence: Synthetic primer
gcaattcggggag

SEQ ID NO: 4762 - DNA, 13 bp, Artificial Sequence
  Description of Artificial Sequence: Synthetic primer
agaacatctacga

SEQ ID NO: 4763 - DNA, 13 bp, Artificial Sequence
  Description of Artificial Sequence: Synthetic primer
aaagcgaaactgg

SEQ ID NO: 4764 - DNA, 13 bp, Artificial Sequence
  Description of Artificial Sequence: Synthetic primer
ccagcggcacgaa

SEQ ID NO: 4765 - DNA, 13 bp, Artificial Sequence
  Description of Artificial Sequence: Synthetic primer
gcggccgtagttt

SEQ ID NO: 4766 - DNA, 13 bp, Artificial Sequence
  Description of Artificial Sequence: Synthetic primer
gaagcctgctccg

SEQ ID NO: 4767 - DNA, 13 bp, Artificial Sequence
  Description of Artificial Sequence: Synthetic primer
cttgtggtgcctc

SEQ ID NO: 4768 - DNA, 13 bp, Artificial Sequence
  Description of Artificial Sequence: Synthetic primer
caaggcgctattt

SEQ ID NO: 4769 - DNA, 13 bp, Artificial Sequence
  Description of Artificial Sequence: Synthetic primer
ggatcgcttctcg

SEQ ID NO: 4770 - DNA, 13 bp, Artificial Sequence
  Description of Artificial Sequence: Synthetic primer
accaccatcgaca

SEQ ID NO: 4771 - DNA, 13 bp, Artificial Sequence
  Description of Artificial Sequence: Synthetic primer
gctgaagttggat

SEQ ID NO: 4772 - DNA, 13 bp, Artificial Sequence
  Description of Artificial Sequence: Synthetic primer
ccaacaattggtt

SEQ ID NO: 4773 - DNA, 13 bp, Artificial Sequence
  Description of Artificial Sequence: Synthetic primer
cgaggaagttggg

SEQ ID NO: 4774 - DNA, 13 bp, Artificial Sequence
  Description of Artificial Sequence: Synthetic primer
ccctcgccaatgc

SEQ ID NO: 4775 - DNA, 13 bp, Artificial Sequence
  Description of Artificial Sequence: Synthetic primer
ctggatgcggcca

SEQ ID NO: 4776 - DNA, 13 bp, Artificial Sequence
  Description of Artificial Sequence: Synthetic primer
gttatgtggtggc

SEQ ID NO: 4777 - DNA, 13 bp, Artificial Sequence
  Description of Artificial Sequence: Synthetic primer
acgcgcgtcaacc

SEQ ID NO: 4778 - DNA, 13 bp, Artificial Sequence
  Description of Artificial Sequence: Synthetic primer
tttaggtgtggtt

SEQ ID NO: 4779 - DNA, 13 bp, Artificial Sequence
  Description of Artificial Sequence: Synthetic primer
atatcggtgatta

SEQ ID NO: 4780 - DNA, 13 bp, Artificial Sequence
  Description of Artificial Sequence: Synthetic primer
acttcaagcagtg

SEQ ID NO: 4781 - DNA, 13 bp, Artificial Sequence
  Description of Artificial Sequence: Synthetic primer
accccagcatagg

SEQ ID NO: 4782 - DNA, 13 bp, Artificial Sequence
  Description of Artificial Sequence: Synthetic primer
gcccgaaagtttt

SEQ ID NO: 4783 - DNA, 13 bp, Artificial Sequence
  Description of Artificial Sequence: Synthetic primer
cgtcaatgggcct

SEQ ID NO: 4784 - DNA, 13 bp, Artificial Sequence
  Description of Artificial Sequence: Synthetic primer
aaatcaactcaga

SEQ ID NO: 4785 - DNA, 13 bp, Artificial Sequence
  Description of Artificial Sequence: Synthetic primer
gccgtcacgaaca

SEQ ID NO: 4786 - DNA, 13 bp, Artificial Sequence
  Description of Artificial Sequence: Synthetic primer
gcatgaccgtcat

SEQ ID NO: 4787 - DNA, 13 bp, Artificial Sequence
  Description of Artificial Sequence: Synthetic primer
aaacaaccagatt

SEQ ID NO: 4788 - DNA, 13 bp, Artificial Sequence
  Description of Artificial Sequence: Synthetic primer
caggtaaccaatc

SEQ ID NO: 4789 - DNA, 13 bp, Artificial Sequence
  Description of Artificial Sequence: Synthetic primer
gtgcttttcaagc

SEQ ID NO: 4790 - DNA, 13 bp, Artificial Sequence
  Description of Artificial Sequence: Synthetic primer
gtgagaatgttac

SEQ ID NO: 4791 - DNA, 13 bp, Artificial Sequence
  Description of Artificial Sequence: Synthetic primer
caaacactggaaa

SEQ ID NO: 4792 - DNA, 13 bp, Artificial Sequence
  Description of Artificial Sequence: Synthetic primer
cacaggattgagt

SEQ ID NO: 4793 - DNA, 13 bp, Artificial Sequence
  Description of Artificial Sequence: Synthetic primer
tcaatggttcgtc

SEQ ID NO: 4794 - DNA, 13 bp, Artificial Sequence
  Description of Artificial Sequence: Synthetic primer
gcgccgcttcgtt

SEQ ID NO: 4795 - DNA, 13 bp, Artificial Sequence
  Description of Artificial Sequence: Synthetic primer
cattgatgaaggt

SEQ ID NO: 4796 - DNA, 13 bp, Artificial Sequence
  Description of Artificial Sequence: Synthetic primer
acttttagttgga

SEQ ID NO: 4797 - DNA, 13 bp, Artificial Sequence
  Description of Artificial Sequence: Synthetic primer
gttacagcttatg

SEQ ID NO: 4798 - DNA, 13 bp, Artificial Sequence
  Description of Artificial Sequence: Synthetic primer
gccacattggagc

SEQ ID NO: 4799 - DNA, 13 bp, Artificial Sequence
  Description of Artificial Sequence: Synthetic primer
cttcctcagttag

SEQ ID NO: 4800 - DNA, 13 bp, Artificial Sequence
  Description of Artificial Sequence: Synthetic primer
ctaacagtgcaga

SEQ ID NO: 4801 - DNA, 13 bp, Artificial Sequence
  Description of Artificial Sequence: Synthetic primer
cttcgcttttacg

SEQ ID NO: 4802 - DNA, 13 bp, Artificial Sequence
  Description of Artificial Sequence: Synthetic primer
gatatccaaggat

SEQ ID NO: 4803 - DNA, 13 bp, Artificial Sequence
  Description of Artificial Sequence: Synthetic primer
tactgtgttgatc

SEQ ID NO: 4804 - DNA, 13 bp, Artificial Sequence
  Description of Artificial Sequence: Synthetic primer
ataagacgtatcg

SEQ ID NO: 4805 - DNA, 13 bp, Artificial Sequence
  Description of Artificial Sequence: Synthetic primer
ggaaataatcagc

SEQ ID NO: 4806 - DNA, 13 bp, Artificial Sequence
  Description of Artificial Sequence: Synthetic primer
tccatcgacggta

SEQ ID NO: 4807 - DNA, 13 bp, Artificial Sequence
  Description of Artificial Sequence: Synthetic primer
cgatgccttgccc

SEQ ID NO: 4808 - DNA, 13 bp, Artificial Sequence
  Description of Artificial Sequence: Synthetic primer
caaacatgaaagc

SEQ ID NO: 4809 - DNA, 13 bp, Artificial Sequence
  Description of Artificial Sequence: Synthetic primer
ttggcgatgcatc

SEQ ID NO: 4810 - DNA, 13 bp, Artificial Sequence
  Description of Artificial Sequence: Synthetic primer
agcatccggatca

SEQ ID NO: 4811 - DNA, 13 bp, Artificial Sequence
  Description of Artificial Sequence: Synthetic primer
aggcacagaacac

SEQ ID NO: 4812 - DNA, 13 bp, Artificial Sequence
  Description of Artificial Sequence: Synthetic primer
tgctcgctggtct

SEQ ID NO: 4813 - DNA, 13 bp, Artificial Sequence
  Description of Artificial Sequence: Synthetic primer
ggcggttgaaggg

SEQ ID NO: 4814 - DNA, 13 bp, Artificial Sequence
  Description of Artificial Sequence: Synthetic primer
taattcttcaacg

SEQ ID NO: 4815 - DNA, 13 bp, Artificial Sequence
  Description of Artificial Sequence: Synthetic primer
cacgccgattaac

SEQ ID NO: 4816 - DNA, 13 bp, Artificial Sequence
  Description of Artificial Sequence: Synthetic primer
ctcttgcacactc

SEQ ID NO: 4817 - DNA, 13 bp, Artificial Sequence
  Description of Artificial Sequence: Synthetic primer
cttccggcaccga

SEQ ID NO: 4818 - DNA, 13 bp, Artificial Sequence
  Description of Artificial Sequence: Synthetic primer
ctgagcctgacgg

SEQ ID NO: 4819 - DNA, 13 bp, Artificial Sequence
  Description of Artificial Sequence: Synthetic primer
ttgaagtgttggc

SEQ ID NO: 4820 - DNA, 13 bp, Artificial Sequence
  Description of Artificial Sequence: Synthetic primer
tcagcacgcccag

SEQ ID NO: 4821 - DNA, 13 bp, Artificial Sequence
  Description of Artificial Sequence: Synthetic primer
ctgccgccgatct

SEQ ID NO: 4822 - DNA, 13 bp, Artificial Sequence
  Description of Artificial Sequence: Synthetic primer
ctgaacattattc

SEQ ID NO: 4823 - DNA, 13 bp, Artificial Sequence
  Description of Artificial Sequence: Synthetic primer
agagttgatggcg

SEQ ID NO: 4824 - DNA, 13 bp, Artificial Sequence
  Description of Artificial Sequence: Synthetic primer
tgttgcgtttcgt

SEQ ID NO: 4825 - DNA, 13 bp, Artificial Sequence
  Description of Artificial Sequence: Synthetic primer
acggttttggttt

SEQ ID NO: 4826 - DNA, 13 bp, Artificial Sequence
  Description of Artificial Sequence: Synthetic primer
cacaatgggtatc

SEQ ID NO: 4827 - DNA, 13 bp, Artificial Sequence
  Description of Artificial Sequence: Synthetic primer
ggtgtggctttgg

SEQ ID NO: 4828 - DNA, 13 bp, Artificial Sequence
  Description of Artificial Sequence: Synthetic primer
tttggccgatagc

SEQ ID NO: 4829 - DNA, 13 bp, Artificial Sequence
  Description of Artificial Sequence: Synthetic primer
gaggatattgggt

SEQ ID NO: 4830 - DNA, 13 bp, Artificial Sequence
  Description of Artificial Sequence: Synthetic primer
caagcgcttctct

SEQ ID NO: 4831 - DNA, 13 bp, Artificial Sequence
  Description of Artificial Sequence: Synthetic primer
tttgtgaagctgt

SEQ ID NO: 4832 - DNA, 13 bp, Artificial Sequence
  Description of Artificial Sequence: Synthetic primer
atccagaccgcta

SEQ ID NO: 4833 - DNA, 13 bp, Artificial Sequence
  Description of Artificial Sequence: Synthetic primer
ttcgatgctgtcc

SEQ ID NO: 4834 - DNA, 13 bp, Artificial Sequence
  Description of Artificial Sequence: Synthetic primer
attccagccttcc

SEQ ID NO: 4835 - DNA, 13 bp, Artificial Sequence
  Description of Artificial Sequence: Synthetic primer
catcaaggtctca

SEQ ID NO: 4836 - DNA, 13 bp, Artificial Sequence
  Description of Artificial Sequence: Synthetic primer
tggtggtagtgcg

SEQ ID NO: 4837 - DNA, 13 bp, Artificial Sequence
  Description of Artificial Sequence: Synthetic primer
aatggaaatacta

SEQ ID NO: 4838 - DNA, 13 bp, Artificial Sequence
  Description of Artificial Sequence: Synthetic primer
agcacgacaatag

SEQ ID NO: 4839 - DNA, 13 bp, Artificial Sequence
  Description of Artificial Sequence: Synthetic primer
gctagttaacgat

SEQ ID NO: 4840 - DNA, 13 bp, Artificial Sequence
  Description of Artificial Sequence: Synthetic primer
aggtacgcgaccg

SEQ ID NO: 4841 - DNA, 13 bp, Artificial Sequence
  Description of Artificial Sequence: Synthetic primer
ggagtactactcc

SEQ ID NO: 4842 - DNA, 13 bp, Artificial Sequence
  Description of Artificial Sequence: Synthetic primer
atgaaaacgaaca

SEQ ID NO: 4843 - DNA, 13 bp, Artificial Sequence
  Description of Artificial Sequence: Synthetic primer
ccttcggcggtag

SEQ ID NO: 4844 - DNA, 13 bp, Artificial Sequence
  Description of Artificial Sequence: Synthetic primer
agccggaattctg

SEQ ID NO: 4845 - DNA, 13 bp, Artificial Sequence
  Description of Artificial Sequence: Synthetic primer
cgtttgattatat

SEQ ID NO: 4846 - DNA, 13 bp, Artificial Sequence
  Description of Artificial Sequence: Synthetic primer
cacccacaacttg

SEQ ID NO: 4847 - DNA, 13 bp, Artificial Sequence
  Description of Artificial Sequence: Synthetic primer
agcgctacgcaac

SEQ ID NO: 4848 - DNA, 13 bp, Artificial Sequence
  Description of Artificial Sequence: Synthetic primer
aactggcagatgc

SEQ ID NO: 4849 - DNA, 13 bp, Artificial Sequence
  Description of Artificial Sequence: Synthetic primer
taaagtcgcttag

SEQ ID NO: 4850 - DNA, 13 bp, Artificial Sequence
  Description of Artificial Sequence: Synthetic primer
ggcagtcgaagag

SEQ ID NO: 4851 - DNA, 13 bp, Artificial Sequence
  Description of Artificial Sequence: Synthetic primer
accctgctgccca

SEQ ID NO: 4852 - DNA, 13 bp, Artificial Sequence
  Description of Artificial Sequence: Synthetic primer
gaaagtgccctac

SEQ ID NO: 4853 - DNA, 13 bp, Artificial Sequence
  Description of Artificial Sequence: Synthetic primer
acaccctggtgaa

SEQ ID NO: 4854 - DNA, 13 bp, Artificial Sequence
  Description of Artificial Sequence: Synthetic primer
tgaagaacacctt

SEQ ID NO: 4855 - DNA, 13 bp, Artificial Sequence
  Description of Artificial Sequence: Synthetic primer
caggtttagtcat

SEQ ID NO: 4856 - DNA, 13 bp, Artificial Sequence
  Description of Artificial Sequence: Synthetic primer
gggaggatggtgc

SEQ ID NO: 4857 - DNA, 13 bp, Artificial Sequence
  Description of Artificial Sequence: Synthetic primer
gatttccctcgcc

SEQ ID NO: 4858 - DNA, 13 bp, Artificial Sequence
  Description of Artificial Sequence: Synthetic primer
aagttttgtctgg

SEQ ID NO: 4859 - DNA, 13 bp, Artificial Sequence
  Description of Artificial Sequence: Synthetic primer
aacggattcttca

SEQ ID NO: 4860 - DNA, 13 bp, Artificial Sequence
  Description of Artificial Sequence: Synthetic primer
tgcagagaaaagt

SEQ ID NO: 4861 - DNA, 13 bp, Artificial Sequence
  Description of Artificial Sequence: Synthetic primer
agtattactgcag

SEQ ID NO: 4862 - DNA, 13 bp, Artificial Sequence
  Description of Artificial Sequence: Synthetic primer
ttggaggaaattc

SEQ ID NO: 4863 - DNA, 13 bp, Artificial Sequence
  Description of Artificial Sequence: Synthetic primer
atcagcatcaaag

SEQ ID NO: 4864 - DNA, 13 bp, Artificial Sequence
  Description of Artificial Sequence: Synthetic primer
gcggaaggcaata

SEQ ID NO: 4865 - DNA, 13 bp, Artificial Sequence
  Description of Artificial Sequence: Synthetic primer
tcggagaagatgg

SEQ ID NO: 4866 - DNA, 13 bp, Artificial Sequence
  Description of Artificial Sequence: Synthetic primer
tggcggaacgctc

SEQ ID NO: 4867 - DNA, 13 bp, Artificial Sequence
  Description of Artificial Sequence: Synthetic primer
aggcgtcccaact

SEQ ID NO: 4868 - DNA, 13 bp, Artificial Sequence
  Description of Artificial Sequence: Synthetic primer
agacgaaatggag

SEQ ID NO: 4869 - DNA, 13 bp, Artificial Sequence
  Description of Artificial Sequence: Synthetic primer
ttcagctggattt

SEQ ID NO: 4870 - DNA, 13 bp, Artificial Sequence
  Description of Artificial Sequence: Synthetic primer
gaatcaggtcatc

SEQ ID NO: 4871 - DNA, 13 bp, Artificial Sequence
  Description of Artificial Sequence: Synthetic primer
acgctggtcaagg

SEQ ID NO: 4872 - DNA, 13 bp, Artificial Sequence
  Description of Artificial Sequence: Synthetic primer
ctaatcctaatct

SEQ ID NO: 4873 - DNA, 13 bp, Artificial Sequence
  Description of Artificial Sequence: Synthetic primer
tcatggatggcga

SEQ ID NO: 4874 - DNA, 13 bp, Artificial Sequence
  Description of Artificial Sequence: Synthetic primer
tgattggattaaa

SEQ ID NO: 4875 - DNA, 13 bp, Artificial Sequence
  Description of Artificial Sequence: Synthetic primer
tgagcaatttgat

SEQ ID NO: 4876 - DNA, 13 bp, Artificial Sequence
  Description of Artificial Sequence: Synthetic primer
gtggctcgttggc

SEQ ID NO: 4877 - DNA, 13 bp, Artificial Sequence
  Description of Artificial Sequence: Synthetic primer
ctaccagggaccc

SEQ ID NO: 4878 - DNA, 13 bp, Artificial Sequence
  Description of Artificial Sequence: Synthetic primer
gcagttccattga

SEQ ID NO: 4879 - DNA, 13 bp, Artificial Sequence
  Description of Artificial Sequence: Synthetic primer
tagctctgcatga

SEQ ID NO: 4880 - DNA, 13 bp, Artificial Sequence
  Description of Artificial Sequence: Synthetic primer
agctaggatcggt

SEQ ID NO: 4881 - DNA, 13 bp, Artificial Sequence
  Description of Artificial Sequence: Synthetic primer
gaaaagcacctta

SEQ ID NO: 4882 - DNA, 13 bp, Artificial Sequence
  Description of Artificial Sequence: Synthetic primer
gtaggaagcaata

SEQ ID NO: 4883 - DNA, 13 bp, Artificial Sequence
  Description of Artificial Sequence: Synthetic primer
cctttgaagatgg

SEQ ID NO: 4884 - DNA, 13 bp, Artificial Sequence
  Description of Artificial Sequence: Synthetic primer
aaccaagatcaaa

SEQ ID NO: 4885 - DNA, 13 bp, Artificial Sequence
  Description of Artificial Sequence: Synthetic primer
ggcgaaggacaac

SEQ ID NO: 4886 - DNA, 13 bp, Artificial Sequence
  Description of Artificial Sequence: Synthetic primer
ctggcgcgtactc

SEQ ID NO: 4887 - DNA, 13 bp, Artificial Sequence
  Description of Artificial Sequence: Synthetic primer
ccgcacatagcac

SEQ ID NO: 4888 - DNA, 13 bp, Artificial Sequence
  Description of Artificial Sequence: Synthetic primer
caggtttactgcg

SEQ ID NO: 4889 - DNA, 13 bp, Artificial Sequence
  Description of Artificial Sequence: Synthetic primer
gggctaaattgcc

SEQ ID NO: 4890 - DNA, 13 bp, Artificial Sequence
  Description of Artificial Sequence: Synthetic primer
gattcatcaacat

SEQ ID NO: 4891 - DNA, 13 bp, Artificial Sequence
  Description of Artificial Sequence: Synthetic primer
gacgcttgctgct

SEQ ID NO: 4892 - DNA, 13 bp, Artificial Sequence
  Description of Artificial Sequence: Synthetic primer
gttgctgctgctc

SEQ ID NO: 4893 - DNA, 13 bp, Artificial Sequence
  Description of Artificial Sequence: Synthetic primer
ggatctagaatat

SEQ ID NO: 4894 - DNA, 13 bp, Artificial Sequence
  Description of Artificial Sequence: Synthetic primer
ccttggtcagcac

SEQ ID NO: 4895 - DNA, 13 bp, Artificial Sequence
  Description of Artificial Sequence: Synthetic primer
gggttgggcttcg

SEQ ID NO: 4896 - DNA, 13 bp, Artificial Sequence
  Description of Artificial Sequence: Synthetic primer
aatccacatcggc

SEQ ID NO: 4897 - DNA, 13 bp, Artificial Sequence
  Description of Artificial Sequence: Synthetic primer
tgtcctgcgccac

SEQ ID NO: 4898 - DNA, 13 bp, Artificial Sequence
  Description of Artificial Sequence: Synthetic primer
cgctctggagtga

SEQ ID NO: 4899 - DNA, 13 bp, Artificial Sequence
  Description of Artificial Sequence: Synthetic primer
cttcagcgatgaa

SEQ ID NO: 4900 - DNA, 13 bp, Artificial Sequence
  Description of Artificial Sequence: Synthetic primer
ccgaccaacattg

SEQ ID NO: 4901 - DNA, 13 bp, Artificial Sequence
  Description of Artificial Sequence: Synthetic primer
tcgcgttaagcgg

SEQ ID NO: 4902 - DNA, 13 bp, Artificial Sequence
  Description of Artificial Sequence: Synthetic primer
atcgcgcgctcac

SEQ ID NO: 4903 - DNA, 13 bp, Artificial Sequence
  Description of Artificial Sequence: Synthetic primer
caatcagtaatgc

SEQ ID NO: 4904 - DNA, 13 bp, Artificial Sequence
  Description of Artificial Sequence: Synthetic primer
gtatattggttgt

SEQ ID NO: 4905 - DNA, 13 bp, Artificial Sequence
  Description of Artificial Sequence: Synthetic primer
ctcggcaagatgc

SEQ ID NO: 4906 - DNA, 13 bp, Artificial Sequence
  Description of Artificial Sequence: Synthetic primer
aagaattaattgc

SEQ ID NO: 4907 - DNA, 13 bp, Artificial Sequence
  Description of Artificial Sequence: Synthetic primer
cactcagttcgcc

SEQ ID NO: 4908 - DNA, 13 bp, Artificial Sequence
  Description of Artificial Sequence: Synthetic primer
catggtgtcgaac

SEQ ID NO: 4909 - DNA, 13 bp, Artificial Sequence
  Description of Artificial Sequence: Synthetic primer
ttttcaggcagcg

SEQ ID NO: 4910 - DNA, 13 bp, Artificial Sequence
  Description of Artificial Sequence: Synthetic primer
tggcgaactcgac

SEQ ID NO: 4911 - DNA, 13 bp, Artificial Sequence
  Description of Artificial Sequence: Synthetic primer
tatgacgatagca

SEQ ID NO: 4912 - DNA, 13 bp, Artificial Sequence
  Description of Artificial Sequence: Synthetic primer
catgcagaactcg

SEQ ID NO: 4913 - DNA, 13 bp, Artificial Sequence
  Description of Artificial Sequence: Synthetic primer
tgtttcttcaact

SEQ ID NO: 4914 - DNA, 13 bp, Artificial Sequence
  Description of Artificial Sequence: Synthetic primer
gacgagctggcca

SEQ ID NO: 4915 - DNA, 13 bp, Artificial Sequence
  Description of Artificial Sequence: Synthetic primer
tgttgcaacgcct

SEQ ID NO: 4916 - DNA, 13 bp, Artificial Sequence
  Description of Artificial Sequence: Synthetic primer
ctgtcggcgaacc

SEQ ID NO: 4917 - DNA, 13 bp, Artificial Sequence
  Description of Artificial Sequence: Synthetic primer
cacgcaaaatttt

SEQ ID NO: 4918 - DNA, 13 bp, Artificial Sequence
  Description of Artificial Sequence: Synthetic primer
ttcgaaccgctat

SEQ ID NO: 4919 - DNA, 13 bp, Artificial Sequence
  Description of Artificial Sequence: Synthetic primer
ttcctggttctct

SEQ ID NO: 4920 - DNA, 13 bp, Artificial Sequence
  Description of Artificial Sequence: Synthetic primer
tgaatgcttcaag

SEQ ID NO: 4921 - DNA, 13 bp, Artificial Sequence
  Description of Artificial Sequence: Synthetic primer
gttcgtggctgat

SEQ ID NO: 4922 - DNA, 13 bp, Artificial Sequence
  Description of Artificial Sequence: Synthetic primer
aatattagtactg

SEQ ID NO: 4923 - DNA, 13 bp, Artificial Sequence
  Description of Artificial Sequence: Synthetic primer
aaattgttgtcgg

SEQ ID NO: 4924 - DNA, 13 bp, Artificial Sequence
  Description of Artificial Sequence: Synthetic primer
acgatgttgtctc

SEQ ID NO: 4925 - DNA, 13 bp, Artificial Sequence
  Description of Artificial Sequence: Synthetic primer
gggtgtcaggctg

SEQ ID NO: 4926 - DNA, 13 bp, Artificial Sequence
  Description of Artificial Sequence: Synthetic primer
tgttgcaacagct

SEQ ID NO: 4927 - DNA, 13 bp, Artificial Sequence
  Description of Artificial Sequence: Synthetic primer
tggtatcagcctg

SEQ ID NO: 4928 - DNA, 13 bp, Artificial Sequence
  Description of Artificial Sequence: Synthetic primer
gtacaggttcaaa

SEQ ID NO: 4929 - DNA, 13 bp, Artificial Sequence
  Description of Artificial Sequence: Synthetic primer
tgctgggtcacgg

SEQ ID NO: 4930 - DNA, 13 bp, Artificial Sequence
  Description of Artificial Sequence: Synthetic primer
gtacacgtttcgc

SEQ ID NO: 4931 - DNA, 13 bp, Artificial Sequence
  Description of Artificial Sequence: Synthetic primer
accagactcgtcg

SEQ ID NO: 4932 - DNA, 13 bp, Artificial Sequence
  Description of Artificial Sequence: Synthetic primer
tacaagtactttt

SEQ ID NO: 4933 - DNA, 13 bp, Artificial Sequence
  Description of Artificial Sequence: Synthetic primer
caatgatgaaaga

SEQ ID NO: 4934 - DNA, 13 bp, Artificial Sequence
  Description of Artificial Sequence: Synthetic primer
ggcttaatacaaa

SEQ ID NO: 4935 - DNA, 13 bp, Artificial Sequence
  Description of Artificial Sequence: Synthetic primer
atcaattgatgac

SEQ ID NO: 4936 - DNA, 13 bp, Artificial Sequence
  Description of Artificial Sequence: Synthetic primer
ccttctacaattt

SEQ ID NO: 4937 - DNA, 13 bp, Artificial Sequence
  Description of Artificial Sequence: Synthetic primer
taccaccgtgacc

SEQ ID NO: 4938 - DNA, 13 bp, Artificial Sequence
  Description of Artificial Sequence: Synthetic primer
gaacgaccagatt

SEQ ID NO: 4939 - DNA, 13 bp, Artificial Sequence
  Description of Artificial Sequence: Synthetic primer
tactttgtctatt

SEQ ID NO: 4940 - DNA, 13 bp, Artificial Sequence
  Description of Artificial Sequence: Synthetic primer
caccaggtgaaat

SEQ ID NO: 4941 - DNA, 13 bp, Artificial Sequence
  Description of Artificial Sequence: Synthetic primer
gcagaacttgaaa

SEQ ID NO: 4942 - DNA, 13 bp, Artificial Sequence
  Description of Artificial Sequence: Synthetic primer
agtagtcgcttca

SEQ ID NO: 4943 - DNA, 13 bp, Artificial Sequence
  Description of Artificial Sequence: Synthetic primer
tacttaacgagtg

SEQ ID NO: 4944 - DNA, 13 bp, Artificial Sequence
  Description of Artificial Sequence: Synthetic primer
ggcaatgccagac

SEQ ID NO: 4945 - DNA, 13 bp, Artificial Sequence
  Description of Artificial Sequence: Synthetic primer
aaaccaggctttt

SEQ ID NO: 4946 - DNA, 13 bp, Artificial Sequence
  Description of Artificial Sequence: Synthetic primer
cgaaagtacgcgt

SEQ ID NO: 4947 - DNA, 13 bp, Artificial Sequence
  Description of Artificial Sequence: Synthetic primer
caatcttttcgca

SEQ ID NO: 4948 - DNA, 13 bp, Artificial Sequence
  Description of Artificial Sequence: Synthetic primer
attttgcccagga

SEQ ID NO: 4949 - DNA, 13 bp, Artificial Sequence
  Description of Artificial Sequence: Synthetic primer
cgaacaaaccgat

SEQ ID NO: 4950 - DNA, 13 bp, Artificial Sequence
  Description of Artificial Sequence: Synthetic primer
cggcagcaagaag

SEQ ID NO: 4951 - DNA, 13 bp, Artificial Sequence
  Description of Artificial Sequence: Synthetic primer
gtattgcactagg

SEQ ID NO: 4952 - DNA, 13 bp, Artificial Sequence
  Description of Artificial Sequence: Synthetic primer
tagcgatacaaat

SEQ ID NO: 4953 - DNA, 13 bp, Artificial Sequence
  Description of Artificial Sequence: Synthetic primer
cctggattaccgt

SEQ ID NO: 4954 - DNA, 13 bp, Artificial Sequence
  Description of Artificial Sequence: Synthetic primer
gagatcgatccag

SEQ ID NO: 4955 - DNA, 13 bp, Artificial Sequence
  Description of Artificial Sequence: Synthetic primer
aaacgatgcccat

SEQ ID NO: 4956 - DNA, 13 bp, Artificial Sequence
  Description of Artificial Sequence: Synthetic primer
attacgatatgcg

SEQ ID NO: 4957 - DNA, 13 bp, Artificial Sequence
  Description of Artificial Sequence: Synthetic primer
ttcaagaatgcgc

SEQ ID NO: 4958 - DNA, 13 bp, Artificial Sequence
  Description of Artificial Sequence: Synthetic primer
cgatgacggcctc

SEQ ID NO: 4959 - DNA, 13 bp, Artificial Sequence
  Description of Artificial Sequence: Synthetic primer
gattgccgacggc

SEQ ID NO: 4960 - DNA, 13 bp, Artificial Sequence
  Description of Artificial Sequence: Synthetic primer
accaaagacaaaa

SEQ ID NO: 4961 - DNA, 13 bp, Artificial Sequence
  Description of Artificial Sequence: Synthetic primer
cctaccaatgggc

SEQ ID NO: 4962 - DNA, 13 bp, Artificial Sequence
  Description of Artificial Sequence: Synthetic primer
ttttctcattatc

SEQ ID NO: 4963 - DNA, 13 bp, Artificial Sequence
  Description of Artificial Sequence: Synthetic primer
aaaaggaaatcat

SEQ ID NO: 4964 - DNA, 13 bp, Artificial Sequence
  Description of Artificial Sequence: Synthetic primer
gtggcaaagcctg

SEQ ID NO: 4965 - DNA, 13 bp, Artificial Sequence
  Description of Artificial Sequence: Synthetic primer
cagtattgcttgc

SEQ ID NO: 4966 - DNA, 13 bp, Artificial Sequence
  Description of Artificial Sequence: Synthetic primer
ccggggaactgag

SEQ ID NO: 4967 - DNA, 13 bp, Artificial Sequence
  Description of Artificial Sequence: Synthetic primer
tcaactatttggt

SEQ ID NO: 4968 - DNA, 13 bp, Artificial Sequence
  Description of Artificial Sequence: Synthetic primer
ctccctgccatta

SEQ ID NO: 4969 - DNA, 13 bp, Artificial Sequence
  Description of Artificial Sequence: Synthetic primer
atcacaaggggaa

SEQ ID NO: 4970 - DNA, 13 bp, Artificial Sequence
  Description of Artificial Sequence: Synthetic primer
tgactaacacacc

SEQ ID NO: 4971 - DNA, 13 bp, Artificial Sequence
  Description of Artificial Sequence: Synthetic primer
atcgggacacatg

SEQ ID NO: 4972 - DNA, 13 bp, Artificial Sequence
  Description of Artificial Sequence: Synthetic primer
ggcgtgaaaaggt

SEQ ID NO: 4973 - DNA, 13 bp, Artificial Sequence
  Description of Artificial Sequence: Synthetic primer
aagccttacgccg

SEQ ID NO: 4974 - DNA, 13 bp, Artificial Sequence
  Description of Artificial Sequence: Synthetic primer
aaggaagtcaaaa

SEQ ID NO: 4975 - DNA, 13 bp, Artificial Sequence
  Description of Artificial Sequence: Synthetic primer
cattgatctattt

SEQ ID NO: 4976 - DNA, 13 bp, Artificial Sequence
  Description of Artificial Sequence: Synthetic primer
acgatgtatgtca

SEQ ID NO: 4977 - DNA, 13 bp, Artificial Sequence
  Description of Artificial Sequence: Synthetic primer
cccgcgaagaatg

SEQ ID NO: 4978 - DNA, 13 bp, Artificial Sequence
  Description of Artificial Sequence: Synthetic primer
tggcatcgtccac

SEQ ID NO: 4979 - DNA, 13 bp, Artificial Sequence
  Description of Artificial Sequence: Synthetic primer
tttgttgttcgac

SEQ ID NO: 4980 - DNA, 13 bp, Artificial Sequence
  Description of Artificial Sequence: Synthetic primer
atctcgccgcatc

SEQ ID NO: 4981 - DNA, 13 bp, Artificial Sequence
  Description of Artificial Sequence: Synthetic primer
tcaaaggtacgga

SEQ ID NO: 4982 - DNA, 13 bp, Artificial Sequence
  Description of Artificial Sequence: Synthetic primer
cttctctctgccg

SEQ ID NO: 4983 - DNA, 13 bp, Artificial Sequence
  Description of Artificial Sequence: Synthetic primer
ttgcgctgtcgct

SEQ ID NO: 4984 - DNA, 13 bp, Artificial Sequence
  Description of Artificial Sequence: Synthetic primer
catgctcaccagc

SEQ ID NO: 4985 - DNA, 13 bp, Artificial Sequence
  Description of Artificial Sequence: Synthetic primer
agatcgccatgta

SEQ ID NO: 4986 - DNA, 13 bp, Artificial Sequence
  Description of Artificial Sequence: Synthetic primer
ctttggcgaattc

SEQ ID NO: 4987 - DNA, 13 bp, Artificial Sequence
  Description of Artificial Sequence: Synthetic primer
tggatgcgtcctg

SEQ ID NO: 4988 - DNA, 13 bp, Artificial Sequence
  Description of Artificial Sequence: Synthetic primer
tactcgtatcacg

SEQ ID NO: 4989 - DNA, 13 bp, Artificial Sequence
  Description of Artificial Sequence: Synthetic primer
tgttcaaaacgac

SEQ ID NO: 4990 - DNA, 13 bp, Artificial Sequence
  Description of Artificial Sequence: Synthetic primer
tcactaatatacg

SEQ ID NO: 4991 - DNA, 13 bp, Artificial Sequence
  Description of Artificial Sequence: Synthetic primer
acaaacagagact

SEQ ID NO: 4992 - DNA, 13 bp, Artificial Sequence
  Description of Artificial Sequence: Synthetic primer
ccgggaggggata

SEQ ID NO: 4993 - DNA, 13 bp, Artificial Sequence
  Description of Artificial Sequence: Synthetic primer
gctggaactttat

SEQ ID NO: 4994 - DNA, 13 bp, Artificial Sequence
  Description of Artificial Sequence: Synthetic primer
agtgcagttgcct

SEQ ID NO: 4995 - DNA, 13 bp, Artificial Sequence
  Description of Artificial Sequence: Synthetic primer
aacaccgagaaat

SEQ ID NO: 4996 - DNA, 13 bp, Artificial Sequence
  Description of Artificial Sequence: Synthetic primer
gttttgcagcgca

SEQ ID NO: 4997 - DNA, 13 bp, Artificial Sequence
  Description of Artificial Sequence: Synthetic primer
gtagcagcctcaa

SEQ ID NO: 4998 - DNA, 13 bp, Artificial Sequence
  Description of Artificial Sequence: Synthetic primer
acaactcattgat

SEQ ID NO: 4999 - DNA, 13 bp, Artificial Sequence
  Description of Artificial Sequence: Synthetic primer
cctgttttaattt

SEQ ID NO: 5000 - DNA, 13 bp, Artificial Sequence
  Description of Artificial Sequence: Synthetic primer
tgttatttgctga

SEQ ID NO: 5001 - DNA, 13 bp, Artificial Sequence
  Description of Artificial Sequence: Synthetic primer
cctatacgatcat

SEQ ID NO: 5002 - DNA, 13 bp, Artificial Sequence
  Description of Artificial Sequence: Synthetic primer
ataacacctgcga

SEQ ID NO: 5003 - DNA, 13 bp, Artificial Sequence
  Description of Artificial Sequence: Synthetic primer
gaacacgtactga

SEQ ID NO: 5004 - DNA, 13 bp, Artificial Sequence
  Description of Artificial Sequence: Synthetic primer
cagcaccacgagg

SEQ ID NO: 5005 - DNA, 13 bp, Artificial Sequence
  Description of Artificial Sequence: Synthetic primer
tcagcgtttctat

SEQ ID NO: 5006 - DNA, 13 bp, Artificial Sequence
  Description of Artificial Sequence: Synthetic primer
tcttccgattaaa

SEQ ID NO: 5007 - DNA, 13 bp, Artificial Sequence
  Description of Artificial Sequence: Synthetic primer
gatgctctatcta

SEQ ID NO: 5008 - DNA, 13 bp, Artificial Sequence
  Description of Artificial Sequence: Synthetic primer
aagttcagatgga

SEQ ID NO: 5009 - DNA, 13 bp, Artificial Sequence
  Description of Artificial Sequence: Synthetic primer
ccttcattatgcc

SEQ ID NO: 5010 - DNA, 13 bp, Artificial Sequence
  Description of Artificial Sequence: Synthetic primer
tgatgctggcccg

SEQ ID NO: 5011 - DNA, 13 bp, Artificial Sequence
  Description of Artificial Sequence: Synthetic primer
taaagcccttcaa

SEQ ID NO: 5012 - DNA, 13 bp, Artificial Sequence
  Description of Artificial Sequence: Synthetic primer
tcctggccaaggc

SEQ ID NO: 5013 - DNA, 13 bp, Artificial Sequence
  Description of Artificial Sequence: Synthetic primer
atactcgaaaagg

SEQ ID NO: 5014 - DNA, 13 bp, Artificial Sequence
  Description of Artificial Sequence: Synthetic primer
ttccgatattaaa

SEQ ID NO: 5015 - DNA, 13 bp, Artificial Sequence
  Description of Artificial Sequence: Synthetic primer
gatcatcaagcag

SEQ ID NO: 5016 - DNA, 13 bp, Artificial Sequence
  Description of Artificial Sequence: Synthetic primer
gcataccagccaa

SEQ ID NO: 5017 - DNA, 13 bp, Artificial Sequence
  Description of Artificial Sequence: Synthetic primer
gttttgagtatag

SEQ ID NO: 5018 - DNA, 13 bp, Artificial Sequence
  Description of Artificial Sequence: Synthetic primer
gcaatgttgacaa

SEQ ID NO: 5019 - DNA, 13 bp, Artificial Sequence
  Description of Artificial Sequence: Synthetic primer
gatttcaagacaa

SEQ ID NO: 5020 - DNA, 13 bp, Artificial Sequence
  Description of Artificial Sequence: Synthetic primer
cagttgctggccg

SEQ ID NO: 5021 - DNA, 13 bp, Artificial Sequence
  Description of Artificial Sequence: Synthetic primer
tctctccgatttg

SEQ ID NO: 5022 - DNA, 13 bp, Artificial Sequence
  Description of Artificial Sequence: Synthetic primer
aactaccgcttcg

SEQ ID NO: 5023 - DNA, 13 bp, Artificial Sequence
  Description of Artificial Sequence: Synthetic primer
atttaccctggca

SEQ ID NO: 5024 - DNA, 13 bp, Artificial Sequence
  Description of Artificial Sequence: Synthetic primer
gtctgtacggctg

SEQ ID NO: 5025 - DNA, 13 bp, Artificial Sequence
  Description of Artificial Sequence: Synthetic primer
tagaatggtcctc

SEQ ID NO: 5026 - DNA, 13 bp, Artificial Sequence
  Description of Artificial Sequence: Synthetic primer
cgccgatctcaat

SEQ ID NO: 5027 - DNA, 13 bp, Artificial Sequence
  Description of Artificial Sequence: Synthetic primer
acgtgcttcgtat

SEQ ID NO: 5028 - DNA, 13 bp, Artificial Sequence
  Description of Artificial Sequence: Synthetic primer
cggaagagaaact

SEQ ID NO: 5029 - DNA, 13 bp, Artificial Sequence
  Description of Artificial Sequence: Synthetic primer
gctatcctgccgg

SEQ ID NO: 5030 - DNA, 13 bp, Artificial Sequence
  Description of Artificial Sequence: Synthetic primer
attttggcagctt

SEQ ID NO: 5031 - DNA, 13 bp, Artificial Sequence
  Description of Artificial Sequence: Synthetic primer
atgcgtatttatt

SEQ ID NO: 5032 - DNA, 13 bp, Artificial Sequence
  Description of Artificial Sequence: Synthetic primer
tgaaggagttggc

SEQ ID NO: 5033 - DNA, 13 bp, Artificial Sequence
  Description of Artificial Sequence: Synthetic primer
gctggccctttgg

SEQ ID NO: 5034 - DNA, 13 bp, Artificial Sequence
  Description of Artificial Sequence: Synthetic primer
gcaggaagaaatc

SEQ ID NO: 5035 - DNA, 13 bp, Artificial Sequence
  Description of Artificial Sequence: Synthetic primer
attttcgcgtggg

SEQ ID NO: 5036 - DNA, 13 bp, Artificial Sequence
  Description of Artificial Sequence: Synthetic primer
gcggcatgatccg

SEQ ID NO: 5037 - DNA, 13 bp, Artificial Sequence
  Description of Artificial Sequence: Synthetic primer
gggctaaagtgct

SEQ ID NO: 5038 - DNA, 13 bp, Artificial Sequence
  Description of Artificial Sequence: Synthetic primer
tgctgcggtttct

SEQ ID NO: 5039 - DNA, 13 bp, Artificial Sequence
  Description of Artificial Sequence: Synthetic primer
gaggccaatacat

SEQ ID NO: 5040 - DNA, 13 bp, Artificial Sequence
  Description of Artificial Sequence: Synthetic primer
ttcgccgtgagca

SEQ ID NO: 5041 - DNA, 13 bp, Artificial Sequence
  Description of Artificial Sequence: Synthetic primer
tcctcaaccaata

SEQ ID NO: 5042 - DNA, 13 bp, Artificial Sequence
  Description of Artificial Sequence: Synthetic primer
aacgccgtggcag

SEQ ID NO: 5043 - DNA, 13 bp, Artificial Sequence
  Description of Artificial Sequence: Synthetic primer
tagaacctaataa

SEQ ID NO: 5044 - DNA, 13 bp, Artificial Sequence
  Description of Artificial Sequence: Synthetic primer
gagttttatgatt

SEQ ID NO: 5045 - DNA, 13 bp, Artificial Sequence
  Description of Artificial Sequence: Synthetic primer
acccgatcgccca

SEQ ID NO: 5046 - DNA, 13 bp, Artificial Sequence
  Description of Artificial Sequence: Synthetic primer
ggtgtgggaagaa

SEQ ID NO: 5047 - DNA, 13 bp, Artificial Sequence
  Description of Artificial Sequence: Synthetic primer
acatcaccttcct

SEQ ID NO: 5048 - DNA, 13 bp, Artificial Sequence
  Description of Artificial Sequence: Synthetic primer
catgaatgatcca

SEQ ID NO: 5049 - DNA, 13 bp, Artificial Sequence
  Description of Artificial Sequence: Synthetic primer
aggaagctgctac

SEQ ID NO: 5050 - DNA, 13 bp, Artificial Sequence
  Description of Artificial Sequence: Synthetic primer
gtaccaatgcgcc

SEQ ID NO: 5051 - DNA, 13 bp, Artificial Sequence
  Description of Artificial Sequence: Synthetic primer
ttaaatctagtgc

SEQ ID NO: 5052 - DNA, 13 bp, Artificial Sequence
  Description of Artificial Sequence: Synthetic primer
tgcagcgcgaatt

SEQ ID NO: 5053 - DNA, 13 bp, Artificial Sequence
  Description of Artificial Sequence: Synthetic primer
gccaactccagta

SEQ ID NO: 5054 - DNA, 13 bp, Artificial Sequence
  Description of Artificial Sequence: Synthetic primer
gcgattctggcgc

SEQ ID NO: 5055 - DNA, 13 bp, Artificial Sequence
  Description of Artificial Sequence: Synthetic primer
tgcgctcatcgtc

SEQ ID NO: 5056 - DNA, 13 bp, Artificial Sequence
  Description of Artificial Sequence: Synthetic primer
ccgatgttgtgat

SEQ ID NO: 5057 - DNA, 13 bp, Artificial Sequence
  Description of Artificial Sequence: Synthetic primer
gacgatcacgaaa

SEQ ID NO: 5058 - DNA, 13 bp, Artificial Sequence
  Description of Artificial Sequence: Synthetic primer
ggccgaagtcctt

SEQ ID NO: 5059 - DNA, 13 bp, Artificial Sequence
  Description of Artificial Sequence: Synthetic primer
aagatcagcgctg

SEQ ID NO: 5060 - DNA, 13 bp, Artificial Sequence
  Description of Artificial Sequence: Synthetic primer
ttcctggaacgcc

SEQ ID NO: 5061 - DNA, 13 bp, Artificial Sequence
  Description of Artificial Sequence: Synthetic primer
ggatgagattaat

SEQ ID NO: 5062 - DNA, 13 bp, Artificial Sequence
  Description of Artificial Sequence: Synthetic primer
attgtcaaaagaa

SEQ ID NO: 5063 - DNA, 13 bp, Artificial Sequence
  Description of Artificial Sequence: Synthetic primer
aggtgaagtggta

SEQ ID NO: 5064 - DNA, 13 bp, Artificial Sequence
  Description of Artificial Sequence: Synthetic primer
acaatcccattgc

SEQ ID NO: 5065 - DNA, 13 bp, Artificial Sequence
  Description of Artificial Sequence: Synthetic primer
accgatgatgtgt

SEQ ID NO: 5066 - DNA, 13 bp, Artificial Sequence
  Description of Artificial Sequence: Synthetic primer
tatcgtcgccgca

SEQ ID NO: 5067 - DNA, 13 bp, Artificial Sequence
  Description of Artificial Sequence: Synthetic primer
gcaaacgcaggat

SEQ ID NO: 5068 - DNA, 13 bp, Artificial Sequence
  Description of Artificial Sequence: Synthetic primer
actcagaagcaga

SEQ ID NO: 5069 - DNA, 13 bp, Artificial Sequence
  Description of Artificial Sequence: Synthetic primer
cggcacattatta

SEQ ID NO: 5070 - DNA, 13 bp, Artificial Sequence
  Description of Artificial Sequence: Synthetic primer
gaaaggtggcttc

SEQ ID NO: 5071 - DNA, 13 bp, Artificial Sequence
  Description of Artificial Sequence: Synthetic primer
ggttccgtggtca

SEQ ID NO: 5072 - DNA, 13 bp, Artificial Sequence
  Description of Artificial Sequence: Synthetic primer
ttaatcgcctgga

SEQ ID NO: 5073 - DNA, 13 bp, Artificial Sequence
  Description of Artificial Sequence: Synthetic primer
gcattctggccca

SEQ ID NO: 5074 - DNA, 13 bp, Artificial Sequence
  Description of Artificial Sequence: Synthetic primer
ggtaaatcaccaa

SEQ ID NO: 5075 - DNA, 13 bp, Artificial Sequence
  Description of Artificial Sequence: Synthetic primer
attttgctaatct

SEQ ID NO: 5076 - DNA, 13 bp, Artificial Sequence
  Description of Artificial Sequence: Synthetic primer
gtcgtgcaatacg

SEQ ID NO: 5077 - DNA, 13 bp, Artificial Sequence
  Description of Artificial Sequence: Synthetic primer
ggaatcagtacgc

SEQ ID NO: 5078 - DNA, 13 bp, Artificial Sequence
  Description of Artificial Sequence: Synthetic primer
caggcgcccaata

SEQ ID NO: 5079 - DNA, 13 bp, Artificial Sequence
  Description of Artificial Sequence: Synthetic primer
gttttaattcttc

SEQ ID NO: 5080 - DNA, 13 bp, Artificial Sequence
  Description of Artificial Sequence: Synthetic primer
aatatgcagtagt

SEQ ID NO: 5081 - DNA, 13 bp, Artificial Sequence
  Description of Artificial Sequence: Synthetic primer
catgcccgaagtg

SEQ ID NO: 5082 - DNA, 13 bp, Artificial Sequence
  Description of Artificial Sequence: Synthetic primer
agcaactgcagcg

SEQ ID NO: 5083 - DNA, 13 bp, Artificial Sequence
  Description of Artificial Sequence: Synthetic primer
atccagcctggtt

SEQ ID NO: 5084 - DNA, 13 bp, Artificial Sequence
  Description of Artificial Sequence: Synthetic primer
tttgcgggcgtac

SEQ ID NO: 5085 - DNA, 13 bp, Artificial Sequence
  Description of Artificial Sequence: Synthetic primer
aaatttgatgctc

SEQ ID NO: 5086 - DNA, 13 bp, Artificial Sequence
  Description of Artificial Sequence: Synthetic primer
cagaagcgcgtaa

SEQ ID NO: 5087 - DNA, 13 bp, Artificial Sequence
  Description of Artificial Sequence: Synthetic primer
ctcggggtgatcg

SEQ ID NO: 5088 - DNA, 13 bp, Artificial Sequence
  Description of Artificial Sequence: Synthetic primer
gtgatcaccccgg

SEQ ID NO: 5089 - DNA, 13 bp, Artificial Sequence
  Description of Artificial Sequence: Synthetic primer
gacgatgtgctca

SEQ ID NO: 5090 - DNA, 13 bp, Artificial Sequence
  Description of Artificial Sequence: Synthetic primer
ccccagaaagact

SEQ ID NO: 5091 - DNA, 13 bp, Artificial Sequence
  Description of Artificial Sequence: Synthetic primer
taattagcccgat

SEQ ID NO: 5092 - DNA, 13 bp, Artificial Sequence
  Description of Artificial Sequence: Synthetic primer
ctgaaacgtaaag

SEQ ID NO: 5093 - DNA, 13 bp, Artificial Sequence
  Description of Artificial Sequence: Synthetic primer
actggcagggatc

SEQ ID NO: 5094 - DNA, 13 bp, Artificial Sequence
  Description of Artificial Sequence: Synthetic primer
acaagtaatcgag

SEQ ID NO: 5095 - DNA, 13 bp, Artificial Sequence
  Description of Artificial Sequence: Synthetic primer
gccttgtcacggt

SEQ ID NO: 5096 - DNA, 13 bp, Artificial Sequence
  Description of Artificial Sequence: Synthetic primer
tagaatagattgt

SEQ ID NO: 5097 - DNA, 13 bp, Artificial Sequence
  Description of Artificial Sequence: Synthetic primer
gacagtgcagcag

SEQ ID NO: 5098 - DNA, 13 bp, Artificial Sequence
  Description of Artificial Sequence: Synthetic primer
tcaagcaccttaa

SEQ ID NO: 5099 - DNA, 13 bp, Artificial Sequence
  Description of Artificial Sequence: Synthetic primer
tgatcaaccgggt

SEQ ID NO: 5100 - DNA, 13 bp, Artificial Sequence
  Description of Artificial Sequence: Synthetic primer
agcagatttgctc

SEQ ID NO: 5101 - DNA, 13 bp, Artificial Sequence
  Description of Artificial Sequence: Synthetic primer
aaaatgcgatcga

SEQ ID NO: 5102 - DNA, 13 bp, Artificial Sequence
  Description of Artificial Sequence: Synthetic primer
cgcgatctgctga

SEQ ID NO: 5103 - DNA, 13 bp, Artificial Sequence
  Description of Artificial Sequence: Synthetic primer
ctgcggattgttc

SEQ ID NO: 5104 - DNA, 13 bp, Artificial Sequence
  Description of Artificial Sequence: Synthetic primer
cttcgccttatga

SEQ ID NO: 5105 - DNA, 13 bp, Artificial Sequence
  Description of Artificial Sequence: Synthetic primer
cggggagaaaggt

SEQ ID NO: 5106 - DNA, 13 bp, Artificial Sequence
  Description of Artificial Sequence: Synthetic primer
ggactggtgcgtc

SEQ ID NO: 5107 - DNA, 13 bp, Artificial Sequence
  Description of Artificial Sequence: Synthetic primer
gccttctgaatgt

SEQ ID NO: 5108 - DNA, 13 bp, Artificial Sequence
  Description of Artificial Sequence: Synthetic primer
attacgtggatac

SEQ ID NO: 5109 - DNA, 13 bp, Artificial Sequence
  Description of Artificial Sequence: Synthetic primer
gttgctccattaa

SEQ ID NO: 5110 - DNA, 13 bp, Artificial Sequence
  Description of Artificial Sequence: Synthetic primer
cgctgcaaaatga

SEQ ID NO: 5111 - DNA, 13 bp, Artificial Sequence
  Description of Artificial Sequence: Synthetic primer
ctggtatgttcag

SEQ ID NO: 5112 - DNA, 13 bp, Artificial Sequence
  Description of Artificial Sequence: Synthetic primer
gagcaacgtacga

SEQ ID NO: 5113 - DNA, 13 bp, Artificial Sequence
  Description of Artificial Sequence: Synthetic primer
ctgcacaaaactt

SEQ ID NO: 5114 - DNA, 13 bp, Artificial Sequence
  Description of Artificial Sequence: Synthetic primer
gcatacacacgcg

SEQ ID NO: 5115 - DNA, 13 bp, Artificial Sequence
  Description of Artificial Sequence: Synthetic primer
cgttggccgcatc

SEQ ID NO: 5116 - DNA, 13 bp, Artificial Sequence
  Description of Artificial Sequence: Synthetic primer
ttacgccgatccc

SEQ ID NO: 5117 - DNA, 13 bp, Artificial Sequence
  Description of Artificial Sequence: Synthetic primer
atatagtgataac

SEQ ID NO: 5118 - DNA, 13 bp, Artificial Sequence
  Description of Artificial Sequence: Synthetic primer
atcctgtatctaa

SEQ ID NO: 5119 - DNA, 13 bp, Artificial Sequence
  Description of Artificial Sequence: Synthetic primer
cagatttggtaac

SEQ ID NO: 5120 - DNA, 13 bp, Artificial Sequence
  Description of Artificial Sequence: Synthetic primer
ccattactagtcg

SEQ ID NO: 5121 - DNA, 13 bp, Artificial Sequence
  Description of Artificial Sequence: Synthetic primer
cacgcgcagcgtt

SEQ ID NO: 5122 - DNA, 13 bp, Artificial Sequence
  Description of Artificial Sequence: Synthetic primer
gttgcatcgacac

SEQ ID NO: 5123 - DNA, 13 bp, Artificial Sequence
  Description of Artificial Sequence: Synthetic primer
tcagggtgatcac

SEQ ID NO: 5124 - DNA, 13 bp, Artificial Sequence
  Description of Artificial Sequence: Synthetic primer
ttcaaggcggcgc

SEQ ID NO: 5125 - DNA, 13 bp, Artificial Sequence
  Description of Artificial Sequence: Synthetic primer
cggcgatcaacac

SEQ ID NO: 5126 - DNA, 13 bp, Artificial Sequence
  Description of Artificial Sequence: Synthetic primer
agcagcagcgtcc

SEQ ID NO: 5127 - DNA, 13 bp, Artificial Sequence
  Description of Artificial Sequence: Synthetic primer
ccgatggtggtca

SEQ ID NO: 5128 - DNA, 13 bp, Artificial Sequence
  Description of Artificial Sequence: Synthetic primer
taatgacattgat

SEQ ID NO: 5129 - DNA, 13 bp, Artificial Sequence
  Description of Artificial Sequence: Synthetic primer
aaacgttgatcct

SEQ ID NO: 5130 - DNA, 13 bp, Artificial Sequence
  Description of Artificial Sequence: Synthetic primer
gtaatatgccaga

SEQ ID NO: 5131 - DNA, 13 bp, Artificial Sequence
  Description of Artificial Sequence: Synthetic primer
tccaatgagctca

SEQ ID NO: 5132 - DNA, 13 bp, Artificial Sequence
  Description of Artificial Sequence: Synthetic primer
cgatggccacgtc

SEQ ID NO: 5133 - DNA, 13 bp, Artificial Sequence
  Description of Artificial Sequence: Synthetic primer
acggaaccatctc

SEQ ID NO: 5134 - DNA, 13 bp, Artificial Sequence
  Description of Artificial Sequence: Synthetic primer
ttaatgtttgaag

SEQ ID NO: 5135 - DNA, 13 bp, Artificial Sequence
  Description of Artificial Sequence: Synthetic primer
gattggccctatt

SEQ ID NO: 5136 - DNA, 13 bp, Artificial Sequence
  Description of Artificial Sequence: Synthetic primer
gtatcggttacct

SEQ ID NO: 5137 - DNA, 13 bp, Artificial Sequence
  Description of Artificial Sequence: Synthetic primer
tgtaaatagcaat

SEQ ID NO: 5138 - DNA, 13 bp, Artificial Sequence
  Description of Artificial Sequence: Synthetic primer
gaccagggcgatc

SEQ ID NO: 5139 - DNA, 13 bp, Artificial Sequence
  Description of Artificial Sequence: Synthetic primer
tgaggctcgcacg

SEQ ID NO: 5140 - DNA, 13 bp, Artificial Sequence
  Description of Artificial Sequence: Synthetic primer
tagtggatcttcc

SEQ ID NO: 5141 - DNA, 13 bp, Artificial Sequence
  Description of Artificial Sequence: Synthetic primer
ctagggctttgga

SEQ ID NO: 5142 - DNA, 13 bp, Artificial Sequence
  Description of Artificial Sequence: Synthetic primer
aagaaatccatgg

SEQ ID NO: 5143 - DNA, 13 bp, Artificial Sequence
  Description of Artificial Sequence: Synthetic primer
aattgtatgctgg

SEQ ID NO: 5144 - DNA, 13 bp, Artificial Sequence
  Description of Artificial Sequence: Synthetic primer
acgcgcagtcgat

SEQ ID NO: 5145 - DNA, 13 bp, Artificial Sequence
  Description of Artificial Sequence: Synthetic primer
tcgccctggctga

SEQ ID NO: 5146 - DNA, 13 bp, Artificial Sequence
  Description of Artificial Sequence: Synthetic primer
atacatcgccggt

SEQ ID NO: 5147 - DNA, 13 bp, Artificial Sequence
  Description of Artificial Sequence: Synthetic primer
ggaaatcacgctc

SEQ ID NO: 5148 - DNA, 13 bp, Artificial Sequence
  Description of Artificial Sequence: Synthetic primer
tcactcaagtaat

SEQ ID NO: 5149 - DNA, 13 bp, Artificial Sequence
  Description of Artificial Sequence: Synthetic primer
accccatgccaat

SEQ ID NO: 5150 - DNA, 13 bp, Artificial Sequence
  Description of Artificial Sequence: Synthetic primer
aattcggcggtgg

SEQ ID NO: 5151 - DNA, 13 bp, Artificial Sequence
  Description of Artificial Sequence: Synthetic primer
gcgacggctttct

SEQ ID NO: 5152 - DNA, 13 bp, Artificial Sequence
  Description of Artificial Sequence: Synthetic primer
cattctgaatctc

SEQ ID NO: 5153 - DNA, 13 bp, Artificial Sequence
  Description of Artificial Sequence: Synthetic primer
tggtattcatcgg

SEQ ID NO: 5154 - DNA, 13 bp, Artificial Sequence
  Description of Artificial Sequence: Synthetic primer
agcattccaggta

SEQ ID NO: 5155 - DNA, 13 bp, Artificial Sequence
  Description of Artificial Sequence: Synthetic primer
ctcagctgcgtca

SEQ ID NO: 5156 - DNA, 13 bp, Artificial Sequence
  Description of Artificial Sequence: Synthetic primer
tgctcgtggtacc

SEQ ID NO: 5157 - DNA, 13 bp, Artificial Sequence
  Description of Artificial Sequence: Synthetic primer
cgaccactgccaa

SEQ ID NO: 5158 - DNA, 13 bp, Artificial Sequence
  Description of Artificial Sequence: Synthetic primer
gtttgagaatgaa

SEQ ID NO: 5159 - DNA, 13 bp, Artificial Sequence
  Description of Artificial Sequence: Synthetic primer
cttcaggccctcg

SEQ ID NO: 5160 - DNA, 13 bp, Artificial Sequence
  Description of Artificial Sequence: Synthetic primer
aggtactaccgaa

SEQ ID NO: 5161 - DNA, 13 bp, Artificial Sequence
  Description of Artificial Sequence: Synthetic primer
tggctggcacgct

SEQ ID NO: 5162 - DNA, 13 bp, Artificial Sequence
  Description of Artificial Sequence: Synthetic primer
gattcccctgcct

SEQ ID NO: 5163 - DNA, 13 bp, Artificial Sequence
  Description of Artificial Sequence: Synthetic primer
gcctggtcaccga

SEQ ID NO: 5164 - DNA, 13 bp, Artificial Sequence
  Description of Artificial Sequence: Synthetic primer
gcgaactgcaatt

SEQ ID NO: 5165 - DNA, 13 bp, Artificial Sequence
  Description of Artificial Sequence: Synthetic primer
gtcgacgttcaaa

SEQ ID NO: 5166 - DNA, 13 bp, Artificial Sequence
  Description of Artificial Sequence: Synthetic primer
acgtggtggcatt

SEQ ID NO: 5167 - DNA, 13 bp, Artificial Sequence
  Description of Artificial Sequence: Synthetic primer
ggcgaagtcttga

SEQ ID NO: 5168 - DNA, 13 bp, Artificial Sequence
  Description of Artificial Sequence: Synthetic primer
caagagccgaact

SEQ ID NO: 5169 - DNA, 13 bp, Artificial Sequence
  Description of Artificial Sequence: Synthetic primer
tattccattttga

SEQ ID NO: 5170 - DNA, 13 bp, Artificial Sequence
  Description of Artificial Sequence: Synthetic primer
agcagtgggttcg

SEQ ID NO: 5171 - DNA, 13 bp, Artificial Sequence
  Description of Artificial Sequence: Synthetic primer
cggtacttattgc

SEQ ID NO: 5172 - DNA, 13 bp, Artificial Sequence
  Description of Artificial Sequence: Synthetic primer
aataactttcctt

SEQ ID NO: 5173 - DNA, 13 bp, Artificial Sequence
  Description of Artificial Sequence: Synthetic primer
gcgtactgttcca

SEQ ID NO: 5174 - DNA, 13 bp, Artificial Sequence
  Description of Artificial Sequence: Synthetic primer
aagagggaccggt

SEQ ID NO: 5175 - DNA, 13 bp, Artificial Sequence
  Description of Artificial Sequence: Synthetic primer
tgacctcggcctc

SEQ ID NO: 5176 - DNA, 13 bp, Artificial Sequence
  Description of Artificial Sequence: Synthetic primer
ttaagagatgctt

SEQ ID NO: 5177 - DNA, 13 bp, Artificial Sequence
  Description of Artificial Sequence: Synthetic primer
ctgctgaccatgc

SEQ ID NO: 5178 - DNA, 13 bp, Artificial Sequence
  Description of Artificial Sequence: Synthetic primer
tacagaaccgcgt

SEQ ID NO: 5179 - DNA, 13 bp, Artificial Sequence
  Description of Artificial Sequence: Synthetic primer
ggggcaatacaag

SEQ ID NO: 5180 - DNA, 13 bp, Artificial Sequence
  Description of Artificial Sequence: Synthetic primer
cccgatggagctc

SEQ ID NO: 5181 - DNA, 13 bp, Artificial Sequence
  Description of Artificial Sequence: Synthetic primer
gttcaggctggcg

SEQ ID NO: 5182 - DNA, 13 bp, Artificial Sequence
  Description of Artificial Sequence: Synthetic primer
aaacagatccccg

SEQ ID NO: 5183 - DNA, 13 bp, Artificial Sequence
  Description of Artificial Sequence: Synthetic primer
actttaaataccg

SEQ ID NO: 5184 - DNA, 13 bp, Artificial Sequence
  Description of Artificial Sequence: Synthetic primer
tgaacattatcaa

SEQ ID NO: 5185 - DNA, 13 bp, Artificial Sequence
  Description of Artificial Sequence: Synthetic primer
tactgcgcagaat

SEQ ID NO: 5186 - DNA, 13 bp, Artificial Sequence
  Description of Artificial Sequence: Synthetic primer
ataagctctagcc

SEQ ID NO: 5187 - DNA, 13 bp, Artificial Sequence
  Description of Artificial Sequence: Synthetic primer
taaagctggctta

SEQ ID NO: 5188 - DNA, 13 bp, Artificial Sequence
  Description of Artificial Sequence: Synthetic primer
aaacgctatacaa

SEQ ID NO: 5189 - DNA, 13 bp, Artificial Sequence
  Description of Artificial Sequence: Synthetic primer
atgtccgggttgg

SEQ ID NO: 5190 - DNA, 13 bp, Artificial Sequence
  Description of Artificial Sequence: Synthetic primer
ctcgaaaactaaa

SEQ ID NO: 5191 - DNA, 13 bp, Artificial Sequence
  Description of Artificial Sequence: Synthetic primer
ggatgcaacctcc

SEQ ID NO: 5192 - DNA, 13 bp, Artificial Sequence
  Description of Artificial Sequence: Synthetic primer
agaaaacgcttca

SEQ ID NO: 5193 - DNA, 13 bp, Artificial Sequence
  Description of Artificial Sequence: Synthetic primer
aagctgtgagctg

SEQ ID NO: 5194 - DNA, 13 bp, Artificial Sequence
  Description of Artificial Sequence: Synthetic primer
cgtcgagagcttc

SEQ ID NO: 5195 - DNA, 13 bp, Artificial Sequence
  Description of Artificial Sequence: Synthetic primer
tggcctcgtatgt

SEQ ID NO: 5196 - DNA, 13 bp, Artificial Sequence
  Description of Artificial Sequence: Synthetic primer
gagtatgacgaga

SEQ ID NO: 5197 - DNA, 13 bp, Artificial Sequence
  Description of Artificial Sequence: Synthetic primer
tagctctcgttcg

SEQ ID NO: 5198 - DNA, 13 bp, Artificial Sequence
  Description of Artificial Sequence: Synthetic primer
cgcattactggcc

SEQ ID NO: 5199 - DNA, 13 bp, Artificial Sequence
  Description of Artificial Sequence: Synthetic primer
ccaatgcaccctg

SEQ ID NO: 5200 - DNA, 13 bp, Artificial Sequence
  Description of Artificial Sequence: Synthetic primer
tctattatgtgta

SEQ ID NO: 5201 - DNA, 13 bp, Artificial Sequence
  Description of Artificial Sequence: Synthetic primer
cacctccatggtt

SEQ ID NO: 5202 - DNA, 13 bp, Artificial Sequence
  Description of Artificial Sequence: Synthetic primer
accaatcggcagg

SEQ ID NO: 5203 - DNA, 13 bp, Artificial Sequence
  Description of Artificial Sequence: Synthetic primer
cgcaaggctggag

SEQ ID NO: 5204 - DNA, 13 bp, Artificial Sequence
  Description of Artificial Sequence: Synthetic primer
agcaacaaattcg

SEQ ID NO: 5205 - DNA, 13 bp, Artificial Sequence
  Description of Artificial Sequence: Synthetic primer
actgaactcatca

SEQ ID NO: 5206 - DNA, 13 bp, Artificial Sequence
  Description of Artificial Sequence: Synthetic primer
tggttgaaaatct

SEQ ID NO: 5207 - DNA, 13 bp, Artificial Sequence
  Description of Artificial Sequence: Synthetic primer
ccgctacaacttt

SEQ ID NO: 5208 - DNA, 13 bp, Artificial Sequence
  Description of Artificial Sequence: Synthetic primer
gttagggatgctt

SEQ ID NO: 5209 - DNA, 13 bp, Artificial Sequence
  Description of Artificial Sequence: Synthetic primer
agttctatatggt

SEQ ID NO: 5210 - DNA, 13 bp, Artificial Sequence
  Description of Artificial Sequence: Synthetic primer
aggcagtaaggcc

SEQ ID NO: 5211 - DNA, 13 bp, Artificial Sequence
  Description of Artificial Sequence: Synthetic primer
tccacatggccat

SEQ ID NO: 5212 - DNA, 13 bp, Artificial Sequence
  Description of Artificial Sequence: Synthetic primer
tctactgtcaatc

SEQ ID NO: 5213 - DNA, 13 bp, Artificial Sequence
  Description of Artificial Sequence: Synthetic primer
agcgcgccgaaca

SEQ ID NO: 5214 - DNA, 13 bp, Artificial Sequence
  Description of Artificial Sequence: Synthetic primer
gctggcggaaaag

SEQ ID NO: 5215 - DNA, 13 bp, Artificial Sequence
  Description of Artificial Sequence: Synthetic primer
gggaagtggtcgc

SEQ ID NO: 5216 - DNA, 13 bp, Artificial Sequence
  Description of Artificial Sequence: Synthetic primer
caagcagacccag

SEQ ID NO: 5217 - DNA, 13 bp, Artificial Sequence
  Description of Artificial Sequence: Synthetic primer
tcggtatctgtat

SEQ ID NO: 5218 - DNA, 13 bp, Artificial Sequence
  Description of Artificial Sequence: Synthetic primer
ctgatcagcagac

SEQ ID NO: 5219 - DNA, 13 bp, Artificial Sequence
  Description of Artificial Sequence: Synthetic primer
caaggtgtgtctc

SEQ ID NO: 5220 - DNA, 13 bp, Artificial Sequence
  Description of Artificial Sequence: Synthetic primer
aagggaaatggga

SEQ ID NO: 5221 - DNA, 13 bp, Artificial Sequence
  Description of Artificial Sequence: Synthetic primer
acagtttccttga

SEQ ID NO: 5222 - DNA, 13 bp, Artificial Sequence
  Description of Artificial Sequence: Synthetic primer
gcctgttccgtgg

SEQ ID NO: 5223 - DNA, 13 bp, Artificial Sequence
  Description of Artificial Sequence: Synthetic primer
ataccggctatgc

SEQ ID NO: 5224 - DNA, 13 bp, Artificial Sequence
  Description of Artificial Sequence: Synthetic primer
gcgaaggcatgac

SEQ ID NO: 5225 - DNA, 13 bp, Artificial Sequence
  Description of Artificial Sequence: Synthetic primer
tggctgccaagtc

SEQ ID NO: 5226 - DNA, 13 bp, Artificial Sequence
  Description of Artificial Sequence: Synthetic primer
ttaactcatgaga

SEQ ID NO: 5227 - DNA, 13 bp, Artificial Sequence
  Description of Artificial Sequence: Synthetic primer
cgtatctcgtgga

SEQ ID NO: 5228 - DNA, 13 bp, Artificial Sequence
  Description of Artificial Sequence: Synthetic primer
gaaacaccatcca

SEQ ID NO: 5229 - DNA, 13 bp, Artificial Sequence
  Description of Artificial Sequence: Synthetic primer
gaaaggaatgatg

SEQ ID NO: 5230 - DNA, 13 bp, Artificial Sequence
  Description of Artificial Sequence: Synthetic primer
cgaggtctcgtag

SEQ ID NO: 5231 - DNA, 13 bp, Artificial Sequence
  Description of Artificial Sequence: Synthetic primer
aaggtccactgtc

SEQ ID NO: 5232 - DNA, 13 bp, Artificial Sequence
  Description of Artificial Sequence: Synthetic primer
tcctcataacaaa

SEQ ID NO: 5233 - DNA, 13 bp, Artificial Sequence
  Description of Artificial Sequence: Synthetic primer
tcatcggcaggct

SEQ ID NO: 5234 - DNA, 13 bp, Artificial Sequence
  Description of Artificial Sequence: Synthetic primer
ttaagagaaatga

SEQ ID NO: 5235 - DNA, 13 bp, Artificial Sequence
  Description of Artificial Sequence: Synthetic primer
atctttcagcgcg

SEQ ID NO: 5236 - DNA, 13 bp, Artificial Sequence
  Description of Artificial Sequence: Synthetic primer
ctcgcagtaaatt

SEQ ID NO: 5237 - DNA, 13 bp, Artificial Sequence
  Description of Artificial Sequence: Synthetic primer
acaggtcagcggc

SEQ ID NO: 5238 - DNA, 13 bp, Artificial Sequence
  Description of Artificial Sequence: Synthetic primer
acgttgaagtacc

SEQ ID NO: 5239 - DNA, 13 bp, Artificial Sequence
  Description of Artificial Sequence: Synthetic primer
ccagccctctgag

SEQ ID NO: 5240 - DNA, 13 bp, Artificial Sequence
  Description of Artificial Sequence: Synthetic primer
ttggtgctgcaat

SEQ ID NO: 5241 - DNA, 13 bp, Artificial Sequence
  Description of Artificial Sequence: Synthetic primer
gacgtcatcaatg

SEQ ID NO: 5242 - DNA, 13 bp, Artificial Sequence
  Description of Artificial Sequence: Synthetic primer
gcaacgttctgat

SEQ ID NO: 5243 - DNA, 13 bp, Artificial Sequence
  Description of Artificial Sequence: Synthetic primer
atcttggtgctgg

SEQ ID NO: 5244 - DNA, 13 bp, Artificial Sequence
  Description of Artificial Sequence: Synthetic primer
gaaacagcaaaat

SEQ ID NO: 5245 - DNA, 13 bp, Artificial Sequence
  Description of Artificial Sequence: Synthetic primer
agttcgtgatcga

SEQ ID NO: 5246 - DNA, 13 bp, Artificial Sequence
  Description of Artificial Sequence: Synthetic primer
agtgaatttatgg

SEQ ID NO: 5247 - DNA, 13 bp, Artificial Sequence
  Description of Artificial Sequence: Synthetic primer
aacaggggattga

SEQ ID NO: 5248 - DNA, 13 bp, Artificial Sequence
  Description of Artificial Sequence: Synthetic primer
tttctacaccttg

SEQ ID NO: 5249 - DNA, 13 bp, Artificial Sequence
  Description of Artificial Sequence: Synthetic primer
atgtttcaaattc

SEQ ID NO: 5250 - DNA, 13 bp, Artificial Sequence
  Description of Artificial Sequence: Synthetic primer
ctaaaactgatgt

SEQ ID NO: 5251 - DNA, 13 bp, Artificial Sequence
  Description of Artificial Sequence: Synthetic primer
tctcaaccgttgc

SEQ ID NO: 5252 - DNA, 13 bp, Artificial Sequence
  Description of Artificial Sequence: Synthetic primer
atgctgccgcgta

SEQ ID NO: 5253 - DNA, 13 bp, Artificial Sequence
  Description of Artificial Sequence: Synthetic primer
catcgaggccgac

SEQ ID NO: 5254 - DNA, 13 bp, Artificial Sequence
  Description of Artificial Sequence: Synthetic primer
tagcccaggcgca

SEQ ID NO: 5255 - DNA, 13 bp, Artificial Sequence
  Description of Artificial Sequence: Synthetic primer
gacagatagttgg

SEQ ID NO: 5256 - DNA, 13 bp, Artificial Sequence
  Description of Artificial Sequence: Synthetic primer
aagctttcattat

SEQ ID NO: 5257 - DNA, 13 bp, Artificial Sequence
  Description of Artificial Sequence: Synthetic primer
ctggctgatgtgg

SEQ ID NO: 5258 - DNA, 13 bp, Artificial Sequence
  Description of Artificial Sequence: Synthetic primer
caccccagcactt

SEQ ID NO: 5259 - DNA, 13 bp, Artificial Sequence
  Description of Artificial Sequence: Synthetic primer
aggaacgcgtctg

SEQ ID NO: 5260 - DNA, 13 bp, Artificial Sequence
  Description of Artificial Sequence: Synthetic primer
ctttaagatgtgc

SEQ ID NO: 5261 - DNA, 13 bp, Artificial Sequence
  Description of Artificial Sequence: Synthetic primer
atatattagaacg

SEQ ID NO: 5262 - DNA, 13 bp, Artificial Sequence
  Description of Artificial Sequence: Synthetic primer
gaacgacagcacc

SEQ ID NO: 5263 - DNA, 13 bp, Artificial Sequence
  Description of Artificial Sequence: Synthetic primer
ctgctgaaccgcg

SEQ ID NO: 5264 - DNA, 13 bp, Artificial Sequence
  Description of Artificial Sequence: Synthetic primer
ggagagagcgaga

SEQ ID NO: 5265 - DNA, 13 bp, Artificial Sequence
  Description of Artificial Sequence: Synthetic primer
ggtaattcctaca

SEQ ID NO: 5266 - DNA, 13 bp, Artificial Sequence
  Description of Artificial Sequence: Synthetic primer
caatcatctaccc

SEQ ID NO: 5267 - DNA, 13 bp, Artificial Sequence
  Description of Artificial Sequence: Synthetic primer
cgttacagggcat

SEQ ID NO: 5268 - DNA, 13 bp, Artificial Sequence
  Description of Artificial Sequence: Synthetic primer
actgggcctcgaa

SEQ ID NO: 5269 - DNA, 13 bp, Artificial Sequence
  Description of Artificial Sequence: Synthetic primer
acgtcttattcac

SEQ ID NO: 5270 - DNA, 13 bp, Artificial Sequence
  Description of Artificial Sequence: Synthetic primer
ctttaaatccgac

SEQ ID NO: 5271 - DNA, 13 bp, Artificial Sequence
  Description of Artificial Sequence: Synthetic primer
ttctgttgtttgg

SEQ ID NO: 5272 - DNA, 13 bp, Artificial Sequence
  Description of Artificial Sequence: Synthetic primer
gttcggcccttcg

SEQ ID NO: 5273 - DNA, 13 bp, Artificial Sequence
  Description of Artificial Sequence: Synthetic primer
acaaggtttagca

SEQ ID NO: 5274 - DNA, 13 bp, Artificial Sequence
  Description of Artificial Sequence: Synthetic primer
gccggatagcgtt

SEQ ID NO: 5275 - DNA, 13 bp, Artificial Sequence
  Description of Artificial Sequence: Synthetic primer
agattatacagat

SEQ ID NO: 5276 - DNA, 13 bp, Artificial Sequence
  Description of Artificial Sequence: Synthetic primer
cgtcgcacacaag

SEQ ID NO: 5277 - DNA, 13 bp, Artificial Sequence
  Description of Artificial Sequence: Synthetic primer
attggtcatgatg

SEQ ID NO: 5278 - DNA, 13 bp, Artificial Sequence
  Description of Artificial Sequence: Synthetic primer
gtaagctgacgta

SEQ ID NO: 5279 - DNA, 13 bp, Artificial Sequence
  Description of Artificial Sequence: Synthetic primer
cggtcagtggctt

SEQ ID NO: 5280 - DNA, 13 bp, Artificial Sequence
  Description of Artificial Sequence: Synthetic primer
tgggctttgtgaa

SEQ ID NO: 5281 - DNA, 13 bp, Artificial Sequence
  Description of Artificial Sequence: Synthetic primer
ggcttcttcggtt

SEQ ID NO: 5282 - DNA, 13 bp, Artificial Sequence
  Description of Artificial Sequence: Synthetic primer
ccgtgctgagcga

SEQ ID NO: 5283 - DNA, 13 bp, Artificial Sequence
  Description of Artificial Sequence: Synthetic primer
ctcgcatctcccc

SEQ ID NO: 5284 - DNA, 13 bp, Artificial Sequence
  Description of Artificial Sequence: Synthetic primer
gcaaacagagtca

SEQ ID NO: 5285 - DNA, 13 bp, Artificial Sequence
  Description of Artificial Sequence: Synthetic primer
tacgtgaggcgac

SEQ ID NO: 5286 - DNA, 13 bp, Artificial Sequence
  Description of Artificial Sequence: Synthetic primer
agacggcgtacag

SEQ ID NO: 5287 - DNA, 13 bp, Artificial Sequence
  Description of Artificial Sequence: Synthetic primer
acttcgggccgta

SEQ ID NO: 5288 - DNA, 13 bp, Artificial Sequence
  Description of Artificial Sequence: Synthetic primer
atcagtcaaactg

SEQ ID NO: 5289 - DNA, 13 bp, Artificial Sequence
  Description of Artificial Sequence: Synthetic primer
ccgattgatcatc

SEQ ID NO: 5290 - DNA, 13 bp, Artificial Sequence
  Description of Artificial Sequence: Synthetic primer
tcgtaaacgatgc

SEQ ID NO: 5291 - DNA, 13 bp, Artificial Sequence
  Description of Artificial Sequence: Synthetic primer
cttttggatcagc

SEQ ID NO: 5292 - DNA, 13 bp, Artificial Sequence
  Description of Artificial Sequence: Synthetic primer
tgtttcattcttt

SEQ ID NO: 5293 - DNA, 13 bp, Artificial Sequence
  Description of Artificial Sequence: Synthetic primer
acttctttctgag

SEQ ID NO: 5294 - DNA, 13 bp, Artificial Sequence
  Description of Artificial Sequence: Synthetic primer
gtaccaccaggct

SEQ ID NO: 5295 - DNA, 13 bp, Artificial Sequence
  Description of Artificial Sequence: Synthetic primer
cacgcccaagtac

SEQ ID NO: 5296 - DNA, 13 bp, Artificial Sequence
  Description of Artificial Sequence: Synthetic primer
gtttgtgcctagt

SEQ ID NO: 5297 - DNA, 13 bp, Artificial Sequence
  Description of Artificial Sequence: Synthetic primer
tggcgtattgcct

SEQ ID NO: 5298 - DNA, 13 bp, Artificial Sequence
  Description of Artificial Sequence: Synthetic primer
gcctacgagccca

SEQ ID NO: 5299 - DNA, 13 bp, Artificial Sequence
  Description of Artificial Sequence: Synthetic primer
tcaggagtagcac

SEQ ID NO: 5300 - DNA, 13 bp, Artificial Sequence
  Description of Artificial Sequence: Synthetic primer
aggttagtacaag

SEQ ID NO: 5301 - DNA, 13 bp, Artificial Sequence
  Description of Artificial Sequence: Synthetic primer
tactgtttgcaga

SEQ ID NO: 5302 - DNA, 13 bp, Artificial Sequence
  Description of Artificial Sequence: Synthetic primer
cgtcaaaagacaa

SEQ ID NO: 5303 - DNA, 13 bp, Artificial Sequence
  Description of Artificial Sequence: Synthetic primer
caacaaggcgcgg

SEQ ID NO: 5304 - DNA, 13 bp, Artificial Sequence
  Description of Artificial Sequence: Synthetic primer
gctgacgcccgta

SEQ ID NO: 5305 - DNA, 13 bp, Artificial Sequence
  Description of Artificial Sequence: Synthetic primer
tgggaagcagtga

SEQ ID NO: 5306 - DNA, 13 bp, Artificial Sequence
  Description of Artificial Sequence: Synthetic primer
ttgaggcacagac

SEQ ID NO: 5307 - DNA, 13 bp, Artificial Sequence
  Description of Artificial Sequence: Synthetic primer
tgctttgctggca

SEQ ID NO: 5308 - DNA, 13 bp, Artificial Sequence
  Description of Artificial Sequence: Synthetic primer
gctgttgtgcagc

SEQ ID NO: 5309 - DNA, 13 bp, Artificial Sequence
  Description of Artificial Sequence: Synthetic primer
agcgaacgttgag

SEQ ID NO: 5310 - DNA, 13 bp, Artificial Sequence
  Description of Artificial Sequence: Synthetic primer
atgtataagaact

SEQ ID NO: 5311 - DNA, 13 bp, Artificial Sequence
  Description of Artificial Sequence: Synthetic primer
ttactctaacatt

SEQ ID NO: 5312 - DNA, 13 bp, Artificial Sequence
  Description of Artificial Sequence: Synthetic primer
ctcctcggtgcat

SEQ ID NO: 5313 - DNA, 13 bp, Artificial Sequence
  Description of Artificial Sequence: Synthetic primer
ttcgcgctccgga

SEQ ID NO: 5314 - DNA, 13 bp, Artificial Sequence
  Description of Artificial Sequence: Synthetic primer
atacgagaagatg

SEQ ID NO: 5315 - DNA, 13 bp, Artificial Sequence
  Description of Artificial Sequence: Synthetic primer
acaaatgacaacg

SEQ ID NO: 5316 - DNA, 13 bp, Artificial Sequence
  Description of Artificial Sequence: Synthetic primer
ttttctttccaaa

SEQ ID NO: 5317 - DNA, 13 bp, Artificial Sequence
  Description of Artificial Sequence: Synthetic primer
acgattttagccg

SEQ ID NO: 5318 - DNA, 13 bp, Artificial Sequence
  Description of Artificial Sequence: Synthetic primer
aagctgcgcctct

SEQ ID NO: 5319 - DNA, 13 bp, Artificial Sequence
  Description of Artificial Sequence: Synthetic primer
ataaggatgccaa

SEQ ID NO: 5320 - DNA, 13 bp, Artificial Sequence
  Description of Artificial Sequence: Synthetic primer
cgcatggcagaag

SEQ ID NO: 5321 - DNA, 13 bp, Artificial Sequence
  Description of Artificial Sequence: Synthetic primer
gacaatcaacagc

SEQ ID NO: 5322 - DNA, 13 bp, Artificial Sequence
  Description of Artificial Sequence: Synthetic primer
acgttcaggtgcc

SEQ ID NO: 5323 - DNA, 13 bp, Artificial Sequence
  Description of Artificial Sequence: Synthetic primer
ccgattgctcggc

SEQ ID NO: 5324 - DNA, 13 bp, Artificial Sequence
  Description of Artificial Sequence: Synthetic primer
cctgctagcagcc

SEQ ID NO: 5325 - DNA, 13 bp, Artificial Sequence
  Description of Artificial Sequence: Synthetic primer
ggaacaggccgag

SEQ ID NO: 5326 - DNA, 13 bp, Artificial Sequence
  Description of Artificial Sequence: Synthetic primer
atctcaatgatat

SEQ ID NO: 5327 - DNA, 13 bp, Artificial Sequence
  Description of Artificial Sequence: Synthetic primer
ctattaacaaaga

SEQ ID NO: 5328 - DNA, 13 bp, Artificial Sequence
  Description of Artificial Sequence: Synthetic primer
agtcacgaccgcc

SEQ ID NO: 5329 - DNA, 13 bp, Artificial Sequence
  Description of Artificial Sequence: Synthetic primer
ccaacggcacgct

SEQ ID NO: 5330 - DNA, 13 bp, Artificial Sequence
  Description of Artificial Sequence: Synthetic primer
tcgactggtgcct

SEQ ID NO: 5331 - DNA, 13 bp, Artificial Sequence
  Description of Artificial Sequence: Synthetic primer
acggtgagtggct

SEQ ID NO: 5332 - DNA, 13 bp, Artificial Sequence
  Description of Artificial Sequence: Synthetic primer
caaatgccatccc

SEQ ID NO: 5333 - DNA, 13 bp, Artificial Sequence
  Description of Artificial Sequence: Synthetic primer
gagcgttattatc

SEQ ID NO: 5334 - DNA, 13 bp, Artificial Sequence
  Description of Artificial Sequence: Synthetic primer
gccataatccttt

SEQ ID NO: 5335 - DNA, 13 bp, Artificial Sequence
  Description of Artificial Sequence: Synthetic primer
gaagtatatcagt

SEQ ID NO: 5336 - DNA, 13 bp, Artificial Sequence
  Description of Artificial Sequence: Synthetic primer
ttccgccagttcc

SEQ ID NO: 5337 - DNA, 13 bp, Artificial Sequence
  Description of Artificial Sequence: Synthetic primer
aacataccgggca

SEQ ID NO: 5338 - DNA, 13 bp, Artificial Sequence
  Description of Artificial Sequence: Synthetic primer
atgcggcaagtca

SEQ ID NO: 5339 - DNA, 13 bp, Artificial Sequence
  Description of Artificial Sequence: Synthetic primer
ccatgccaatcgg

SEQ ID NO: 5340 - DNA, 13 bp, Artificial Sequence
  Description of Artificial Sequence: Synthetic primer
gagaaaagagata

SEQ ID NO: 5341 - DNA, 13 bp, Artificial Sequence
  Description of Artificial Sequence: Synthetic primer
cgtcaacgacacg

SEQ ID NO: 5342 - DNA, 13 bp, Artificial Sequence
  Description of Artificial Sequence: Synthetic primer
ttgatgcaggaaa

SEQ ID NO: 5343 - DNA, 13 bp, Artificial Sequence
  Description of Artificial Sequence: Synthetic primer
agaacgccatctt

SEQ ID NO: 5344 - DNA, 13 bp, Artificial Sequence
  Description of Artificial Sequence: Synthetic primer
agtccaaactaaa

SEQ ID NO: 5345 - DNA, 13 bp, Artificial Sequence
  Description of Artificial Sequence: Synthetic primer
tgctaaagcacgg

SEQ ID NO: 5346 - DNA, 13 bp, Artificial Sequence
  Description of Artificial Sequence: Synthetic primer
actgcaacagaac

SEQ ID NO: 5347 - DNA, 13 bp, Artificial Sequence
  Description of Artificial Sequence: Synthetic primer
ctcatagacaagt

SEQ ID NO: 5348 - DNA, 13 bp, Artificial Sequence
  Description of Artificial Sequence: Synthetic primer
gtggtccgcctct

SEQ ID NO: 5349 - DNA, 13 bp, Artificial Sequence
  Description of Artificial Sequence: Synthetic primer
aaggttttacaga

SEQ ID NO: 5350 - DNA, 13 bp, Artificial Sequence
  Description of Artificial Sequence: Synthetic primer
cagcatccagcgg

SEQ ID NO: 5351 - DNA, 13 bp, Artificial Sequence
  Description of Artificial Sequence: Synthetic primer
gctccagttcgtc

SEQ ID NO: 5352 - DNA, 13 bp, Artificial Sequence
  Description of Artificial Sequence: Synthetic primer
tcttcaatgccat

SEQ ID NO: 5353 - DNA, 13 bp, Artificial Sequence
  Description of Artificial Sequence: Synthetic primer
gccaaatatcata

SEQ ID NO: 5354 - DNA, 13 bp, Artificial Sequence
  Description of Artificial Sequence: Synthetic primer
acttgaagagatc

SEQ ID NO: 5355 - DNA, 13 bp, Artificial Sequence
  Description of Artificial Sequence: Synthetic primer
aacgctgcttgag

SEQ ID NO: 5356 - DNA, 13 bp, Artificial Sequence
  Description of Artificial Sequence: Synthetic primer
cgccgccaaatcc

SEQ ID NO: 5357 - DNA, 13 bp, Artificial Sequence
  Description of Artificial Sequence: Synthetic primer
cgactcgccgatg

SEQ ID NO: 5358 - DNA, 13 bp, Artificial Sequence
  Description of Artificial Sequence: Synthetic primer
aacaaaccaatac

SEQ ID NO: 5359 - DNA, 13 bp, Artificial Sequence
  Description of Artificial Sequence: Synthetic primer
tgaatggtgaaat

SEQ ID NO: 5360 - DNA, 13 bp, Artificial Sequence
  Description of Artificial Sequence: Synthetic primer
atccacgccgaag

SEQ ID NO: 5361 - DNA, 13 bp, Artificial Sequence
  Description of Artificial Sequence: Synthetic primer
gtcgctgaccgca

SEQ ID NO: 5362 - DNA, 13 bp, Artificial Sequence
  Description of Artificial Sequence: Synthetic primer
ttgcctaccacga

SEQ ID NO: 5363 - DNA, 13 bp, Artificial Sequence
  Description of Artificial Sequence: Synthetic primer
acaatcgccaggc

SEQ ID NO: 5364 - DNA, 13 bp, Artificial Sequence
  Description of Artificial Sequence: Synthetic primer
gcggcgttcgcta

SEQ ID NO: 5365 - DNA, 13 bp, Artificial Sequence
  Description of Artificial Sequence: Synthetic primer
ctatcacaggcac

SEQ ID NO: 5366 - DNA, 13 bp, Artificial Sequence
  Description of Artificial Sequence: Synthetic primer
cccagatggatgc

SEQ ID NO: 5367 - DNA, 13 bp, Artificial Sequence
  Description of Artificial Sequence: Synthetic primer
cctgtgaaaatga

SEQ ID NO: 5368 - DNA, 13 bp, Artificial Sequence
  Description of Artificial Sequence: Synthetic primer
acgcggtcgagat

SEQ ID NO: 5369 - DNA, 13 bp, Artificial Sequence
  Description of Artificial Sequence: Synthetic primer
agataccgtggct

SEQ ID NO: 5370 - DNA, 13 bp, Artificial Sequence
  Description of Artificial Sequence: Synthetic primer
tgtcgcgaaggca

SEQ ID NO: 5371 - DNA, 13 bp, Artificial Sequence
  Description of Artificial Sequence: Synthetic primer
tgcgtgtacgtcc

SEQ ID NO: 5372 - DNA, 13 bp, Artificial Sequence
  Description of Artificial Sequence: Synthetic primer
cagctggttgcgc

SEQ ID NO: 5373 - DNA, 13 bp, Artificial Sequence
  Description of Artificial Sequence: Synthetic primer
ttagtgtagagca

SEQ ID NO: 5374 - DNA, 13 bp, Artificial Sequence
  Description of Artificial Sequence: Synthetic primer
tcgctctctccag

SEQ ID NO: 5375 - DNA, 13 bp, Artificial Sequence
  Description of Artificial Sequence: Synthetic primer
acccgctcgacta

SEQ ID NO: 5376 - DNA, 13 bp, Artificial Sequence
  Description of Artificial Sequence: Synthetic primer
gtgacgctgaata

SEQ ID NO: 5377 - DNA, 13 bp, Artificial Sequence
  Description of Artificial Sequence: Synthetic primer
aaatcggcgtttt

SEQ ID NO: 5378 - DNA, 13 bp, Artificial Sequence
  Description of Artificial Sequence: Synthetic primer
ccgataggcagcc

SEQ ID NO: 5379 - DNA, 13 bp, Artificial Sequence
  Description of Artificial Sequence: Synthetic primer
tggctcagctgga

SEQ ID NO: 5380 - DNA, 13 bp, Artificial Sequence
  Description of Artificial Sequence: Synthetic primer
caaaggttgccct

SEQ ID NO: 5381 - DNA, 13 bp, Artificial Sequence
  Description of Artificial Sequence: Synthetic primer
tcacttcgttcgc

SEQ ID NO: 5382 - DNA, 13 bp, Artificial Sequence
  Description of Artificial Sequence: Synthetic primer
ggtgatcgccgac

SEQ ID NO: 5383 - DNA, 13 bp, Artificial Sequence
  Description of Artificial Sequence: Synthetic primer
ttcggtcagctcg

SEQ ID NO: 5384 - DNA, 13 bp, Artificial Sequence
  Description of Artificial Sequence: Synthetic primer
gtcgattgagctg

SEQ ID NO: 5385 - DNA, 13 bp, Artificial Sequence
  Description of Artificial Sequence: Synthetic primer
ccatggcggggat

SEQ ID NO: 5386 - DNA, 13 bp, Artificial Sequence
  Description of Artificial Sequence: Synthetic primer
ctgttgcaaagcc

SEQ ID NO: 5387 - DNA, 13 bp, Artificial Sequence
  Description of Artificial Sequence: Synthetic primer
ggtacaagatata

SEQ ID NO: 5388 - DNA, 13 bp, Artificial Sequence
  Description of Artificial Sequence: Synthetic primer
cgttcatcgtcag

SEQ ID NO: 5389 - DNA, 13 bp, Artificial Sequence
  Description of Artificial Sequence: Synthetic primer
gctgcgccgtaac

SEQ ID NO: 5390 - DNA, 13 bp, Artificial Sequence
  Description of Artificial Sequence: Synthetic primer
gcgagttaaacac

SEQ ID NO: 5391 - DNA, 13 bp, Artificial Sequence
  Description of Artificial Sequence: Synthetic primer
tcactttgaacat

SEQ ID NO: 5392 - DNA, 13 bp, Artificial Sequence
  Description of Artificial Sequence: Synthetic primer
ggccaggtcatca

SEQ ID NO: 5393 - DNA, 13 bp, Artificial Sequence
  Description of Artificial Sequence: Synthetic primer
tgaaagagcctgg

SEQ ID NO: 5394 - DNA, 13 bp, Artificial Sequence
  Description of Artificial Sequence: Synthetic primer
ccgatctgggtga

SEQ ID NO: 5395 - DNA, 13 bp, Artificial Sequence
  Description of Artificial Sequence: Synthetic primer
taagcgtcccaga

SEQ ID NO: 5396 - DNA, 13 bp, Artificial Sequence
  Description of Artificial Sequence: Synthetic primer
caagcggcgctat

SEQ ID NO: 5397 - DNA, 13 bp, Artificial Sequence
  Description of Artificial Sequence: Synthetic primer
atatgaacagtat

SEQ ID NO: 5398 - DNA, 13 bp, Artificial Sequence
  Description of Artificial Sequence: Synthetic primer
ctcattagagcaa

SEQ ID NO: 5399 - DNA, 13 bp, Artificial Sequence
  Description of Artificial Sequence: Synthetic primer
catcgatacgccg

SEQ ID NO: 5400 - DNA, 13 bp, Artificial Sequence
  Description of Artificial Sequence: Synthetic primer
gtgcctttccagg

SEQ ID NO: 5401 - DNA, 13 bp, Artificial Sequence
  Description of Artificial Sequence: Synthetic primer
ctgtgaaaccgcc

SEQ ID NO: 5402 - DNA, 13 bp, Artificial Sequence
  Description of Artificial Sequence: Synthetic primer
gccgattggtgct

SEQ ID NO: 5403 - DNA, 13 bp, Artificial Sequence
  Description of Artificial Sequence: Synthetic primer
tctctggcactga

SEQ ID NO: 5404 - DNA, 13 bp, Artificial Sequence
  Description of Artificial Sequence: Synthetic primer
tcctgaagcgcat

SEQ ID NO: 5405 - DNA, 13 bp, Artificial Sequence
  Description of Artificial Sequence: Synthetic primer
acggcagaagagc

SEQ ID NO: 5406 - DNA, 13 bp, Artificial Sequence
  Description of Artificial Sequence: Synthetic primer
tccagcatttcca

SEQ ID NO: 5407 - DNA, 13 bp, Artificial Sequence
  Description of Artificial Sequence: Synthetic primer
gatggcaaggcac

SEQ ID NO: 5408 - DNA, 13 bp, Artificial Sequence
  Description of Artificial Sequence: Synthetic primer
tctcggtctacgc

SEQ ID NO: 5409 - DNA, 13 bp, Artificial Sequence
  Description of Artificial Sequence: Synthetic primer
ggcctttcaccgg

SEQ ID NO: 5410 - DNA, 13 bp, Artificial Sequence
  Description of Artificial Sequence: Synthetic primer
tcaaccaactaaa

SEQ ID NO: 5411 - DNA, 13 bp, Artificial Sequence
  Description of Artificial Sequence: Synthetic primer
gacggtaaagcgg

SEQ ID NO: 5412 - DNA, 13 bp, Artificial Sequence
  Description of Artificial Sequence: Synthetic primer
tatggctcgccgc

SEQ ID NO: 5413 - DNA, 13 bp, Artificial Sequence
  Description of Artificial Sequence: Synthetic primer
ggtaagctcggtg

SEQ ID NO: 5414 - DNA, 13 bp, Artificial Sequence
  Description of Artificial Sequence: Synthetic primer
actcaaacctatg

SEQ ID NO: 5415 - DNA, 13 bp, Artificial Sequence
  Description of Artificial Sequence: Synthetic primer
gatgtcctgcagc

SEQ ID NO: 5416 - DNA, 13 bp, Artificial Sequence
  Description of Artificial Sequence: Synthetic primer
cgcaaacctgctt

SEQ ID NO: 5417 - DNA, 13 bp, Artificial Sequence
  Description of Artificial Sequence: Synthetic primer
acccttcacctaa

SEQ ID NO: 5418 - DNA, 13 bp, Artificial Sequence
  Description of Artificial Sequence: Synthetic primer
acgtagagcgctg

SEQ ID NO: 5419 - DNA, 13 bp, Artificial Sequence
  Description of Artificial Sequence: Synthetic primer
acctaatatggct

SEQ ID NO: 5420 - DNA, 13 bp, Artificial Sequence
  Description of Artificial Sequence: Synthetic primer
tcatatcatgacc

SEQ ID NO: 5421 - DNA, 13 bp, Artificial Sequence
  Description of Artificial Sequence: Synthetic primer
tgccgatcatcag

SEQ ID NO: 5422 - DNA, 13 bp, Artificial Sequence
  Description of Artificial Sequence: Synthetic primer
ttaagagaagaac

SEQ ID NO: 5423 - DNA, 13 bp, Artificial Sequence
  Description of Artificial Sequence: Synthetic primer
gatacactacata

SEQ ID NO: 5424 - DNA, 13 bp, Artificial Sequence
  Description of Artificial Sequence: Synthetic primer
aggggcatcatga

SEQ ID NO: 5425 - DNA, 13 bp, Artificial Sequence
  Description of Artificial Sequence: Synthetic primer
ccgcgactggaac

SEQ ID NO: 5426 - DNA, 13 bp, Artificial Sequence
  Description of Artificial Sequence: Synthetic primer
aagctttacggcc

SEQ ID NO: 5427 - DNA, 13 bp, Artificial Sequence
  Description of Artificial Sequence: Synthetic primer
gacatggtgccac

SEQ ID NO: 5428 - DNA, 13 bp, Artificial Sequence
  Description of Artificial Sequence: Synthetic primer
cggctcggtcatt

SEQ ID NO: 5429 - DNA, 13 bp, Artificial Sequence
  Description of Artificial Sequence: Synthetic primer
gcctacgcctatg

SEQ ID NO: 5430 - DNA, 13 bp, Artificial Sequence
  Description of Artificial Sequence: Synthetic primer
gcttcacctaaaa

SEQ ID NO: 5431 - DNA, 13 bp, Artificial Sequence
  Description of Artificial Sequence: Synthetic primer
taaatccagccag

SEQ ID NO: 5432 - DNA, 13 bp, Artificial Sequence
  Description of Artificial Sequence: Synthetic primer
ccaagcatcgact

SEQ ID NO: 5433 - DNA, 13 bp, Artificial Sequence
  Description of Artificial Sequence: Synthetic primer
aatatcagtactg

SEQ ID NO: 5434 - DNA, 13 bp, Artificial Sequence
  Description of Artificial Sequence: Synthetic primer
gttgtaacgttca

SEQ ID NO: 5435 - DNA, 13 bp, Artificial Sequence
  Description of Artificial Sequence: Synthetic primer
ggatgccttaaca

SEQ ID NO: 5436 - DNA, 13 bp, Artificial Sequence
  Description of Artificial Sequence: Synthetic primer
ttggtggtgcaat

SEQ ID NO: 5437 - DNA, 13 bp, Artificial Sequence
  Description of Artificial Sequence: Synthetic primer
atgcccggcaaat

SEQ ID NO: 5438 - DNA, 13 bp, Artificial Sequence
  Description of Artificial Sequence: Synthetic primer
accctattaactt

SEQ ID NO: 5439 - DNA, 13 bp, Artificial Sequence
  Description of Artificial Sequence: Synthetic primer
atcagcaagaacc

SEQ ID NO: 5440 - DNA, 13 bp, Artificial Sequence
  Description of Artificial Sequence: Synthetic primer
cacaggcgcaaca

SEQ ID NO: 5441 - DNA, 13 bp, Artificial Sequence
  Description of Artificial Sequence: Synthetic primer
ttgcggcgcaaaa

SEQ ID NO: 5442 - DNA, 13 bp, Artificial Sequence
  Description of Artificial Sequence: Synthetic primer
tattatctacagc

SEQ ID NO: 5443 - DNA, 13 bp, Artificial Sequence
  Description of Artificial Sequence: Synthetic primer
tggtcgaaacctc

SEQ ID NO: 5444 - DNA, 13 bp, Artificial Sequence
  Description of Artificial Sequence: Synthetic primer
gactgtaattctg

SEQ ID NO: 5445 - DNA, 13 bp, Artificial Sequence
  Description of Artificial Sequence: Synthetic primer
cttagatcagcaa

SEQ ID NO: 5446 - DNA, 13 bp, Artificial Sequence
  Description of Artificial Sequence: Synthetic primer
ggaattggctacc

SEQ ID NO: 5447 - DNA, 13 bp, Artificial Sequence
  Description of Artificial Sequence: Synthetic primer
tgatctgaaagta

SEQ ID NO: 5448 - DNA, 13 bp, Artificial Sequence
  Description of Artificial Sequence: Synthetic primer
accagcacgagat

SEQ ID NO: 5449 - DNA, 13 bp, Artificial Sequence
  Description of Artificial Sequence: Synthetic primer
acatgaccgcctc

SEQ ID NO: 5450 - DNA, 13 bp, Artificial Sequence
  Description of Artificial Sequence: Synthetic primer
acgacttcacgac

SEQ ID NO: 5451 - DNA, 13 bp, Artificial Sequence
  Description of Artificial Sequence: Synthetic primer
cccttggtgggtc

SEQ ID NO: 5452 - DNA, 13 bp, Artificial Sequence
  Description of Artificial Sequence: Synthetic primer
tgctgcagggctg

SEQ ID NO: 5453 - DNA, 13 bp, Artificial Sequence
  Description of Artificial Sequence: Synthetic primer
agtggatctacgg

SEQ ID NO: 5454 - DNA, 13 bp, Artificial Sequence
  Description of Artificial Sequence: Synthetic primer
tgcccgcgaacat

SEQ ID NO: 5455 - DNA, 13 bp, Artificial Sequence
  Description of Artificial Sequence: Synthetic primer
cggtaagctgtct

SEQ ID NO: 5456 - DNA, 13 bp, Artificial Sequence
  Description of Artificial Sequence: Synthetic primer
ggcctgcatacac

SEQ ID NO: 5457 - DNA, 13 bp, Artificial Sequence
  Description of Artificial Sequence: Synthetic primer
ctcggggttgtca

SEQ ID NO: 5458 - DNA, 13 bp, Artificial Sequence
  Description of Artificial Sequence: Synthetic primer
ataccattgatgt

SEQ ID NO: 5459 - DNA, 13 bp, Artificial Sequence
  Description of Artificial Sequence: Synthetic primer
gatatcgcgagcc

SEQ ID NO: 5460 - DNA, 13 bp, Artificial Sequence
  Description of Artificial Sequence: Synthetic primer
atcttggcggcac

SEQ ID NO: 5461 - DNA, 13 bp, Artificial Sequence
  Description of Artificial Sequence: Synthetic primer
tacccgtcggttt

SEQ ID NO: 5462 - DNA, 13 bp, Artificial Sequence
  Description of Artificial Sequence: Synthetic primer
tcaccgctaccgt

SEQ ID NO: 5463 - DNA, 13 bp, Artificial Sequence
  Description of Artificial Sequence: Synthetic primer
tggtcttgagccg

SEQ ID NO: 5464 - DNA, 13 bp, Artificial Sequence
  Description of Artificial Sequence: Synthetic primer
actatatttctgg

SEQ ID NO: 5465 - DNA, 13 bp, Artificial Sequence
  Description of Artificial Sequence: Synthetic primer
gtagacacgaaag

SEQ ID NO: 5466 - DNA, 13 bp, Artificial Sequence
  Description of Artificial Sequence: Synthetic primer
catagagatgata

SEQ ID NO: 5467 - DNA, 13 bp, Artificial Sequence
  Description of Artificial Sequence: Synthetic primer
cctttatcggttt

SEQ ID NO: 5468 - DNA, 13 bp, Artificial Sequence
  Description of Artificial Sequence: Synthetic primer
cagcgtttgctgc

SEQ ID NO: 5469 - DNA, 13 bp, Artificial Sequence
  Description of Artificial Sequence: Synthetic primer
ggcttatcgcatc

SEQ ID NO: 5470 - DNA, 13 bp, Artificial Sequence
  Description of Artificial Sequence: Synthetic primer
atcacccagctta

SEQ ID NO: 5471 - DNA, 13 bp, Artificial Sequence
  Description of Artificial Sequence: Synthetic primer
cctggccgtctac

SEQ ID NO: 5472 - DNA, 13 bp, Artificial Sequence
  Description of Artificial Sequence: Synthetic primer
tagccatcttgtt

SEQ ID NO: 5473 - DNA, 13 bp, Artificial Sequence
  Description of Artificial Sequence: Synthetic primer
tatgattggatgt

SEQ ID NO: 5474 - DNA, 13 bp, Artificial Sequence
  Description of Artificial Sequence: Synthetic primer
ccgccttgtaata

SEQ ID NO: 5475 - DNA, 13 bp, Artificial Sequence
  Description of Artificial Sequence: Synthetic primer
ggaataccagcaa

SEQ ID NO: 5476 - DNA, 13 bp, Artificial Sequence
  Description of Artificial Sequence: Synthetic primer
tgatattagtgta

SEQ ID NO: 5477 - DNA, 13 bp, Artificial Sequence
  Description of Artificial Sequence: Synthetic primer
tggactcggtgtt

SEQ ID NO: 5478 - DNA, 13 bp, Artificial Sequence
  Description of Artificial Sequence: Synthetic primer
acccatagtttca

SEQ ID NO: 5479 - DNA, 13 bp, Artificial Sequence
  Description of Artificial Sequence: Synthetic primer
tatgccgcaccca

SEQ ID NO: 5480 - DNA, 13 bp, Artificial Sequence
  Description of Artificial Sequence: Synthetic primer
ataaagcccttgc

SEQ ID NO: 5481 - DNA, 13 bp, Artificial Sequence
  Description of Artificial Sequence: Synthetic primer
tttatgtgcaatt

SEQ ID NO: 5482 - DNA, 13 bp, Artificial Sequence
  Description of Artificial Sequence: Synthetic primer
gccttacggtggc

SEQ ID NO: 5483 - DNA, 13 bp, Artificial Sequence
  Description of Artificial Sequence: Synthetic primer
caggaggtccttc

SEQ ID NO: 5484 - DNA, 13 bp, Artificial Sequence
  Description of Artificial Sequence: Synthetic primer
ctgcgttcgaccc

SEQ ID NO: 5485 - DNA, 13 bp, Artificial Sequence
  Description of Artificial Sequence: Synthetic primer
ccttcttctacag

SEQ ID NO: 5486 - DNA, 13 bp, Artificial Sequence
  Description of Artificial Sequence: Synthetic primer
cgcttcgctcgac

SEQ ID NO: 5487 - DNA, 13 bp, Artificial Sequence
  Description of Artificial Sequence: Synthetic primer
ttttgacggctgc

SEQ ID NO: 5488 - DNA, 13 bp, Artificial Sequence
  Description of Artificial Sequence: Synthetic primer
caccatcccgaac

SEQ ID NO: 5489 - DNA, 13 bp, Artificial Sequence
  Description of Artificial Sequence: Synthetic primer
aaatcaggatttt

SEQ ID NO: 5490 - DNA, 13 bp, Artificial Sequence
  Description of Artificial Sequence: Synthetic primer
atacctgaataat

SEQ ID NO: 5491 - DNA, 13 bp, Artificial Sequence
  Description of Artificial Sequence: Synthetic primer
ataaaactagaag

SEQ ID NO: 5492 - DNA, 13 bp, Artificial Sequence
  Description of Artificial Sequence: Synthetic primer
gacctttgccgtc

SEQ ID NO: 5493 - DNA, 13 bp, Artificial Sequence
  Description of Artificial Sequence: Synthetic primer
agaaagtcatcat

SEQ ID NO: 5494 - DNA, 13 bp, Artificial Sequence
  Description of Artificial Sequence: Synthetic primer
gaatcgaccagct

SEQ ID NO: 5495 - DNA, 13 bp, Artificial Sequence
  Description of Artificial Sequence: Synthetic primer
gcatctcccagcc

SEQ ID NO: 5496 - DNA, 13 bp, Artificial Sequence
  Description of Artificial Sequence: Synthetic primer
ccatcgttggcaa

SEQ ID NO: 5497 - DNA, 13 bp, Artificial Sequence
  Description of Artificial Sequence: Synthetic primer
ctttatcagataa

SEQ ID NO: 5498 - DNA, 13 bp, Artificial Sequence
  Description of Artificial Sequence: Synthetic primer
tcatttggatcat

SEQ ID NO: 5499 - DNA, 13 bp, Artificial Sequence
  Description of Artificial Sequence: Synthetic primer
gtcagcgagttga

SEQ ID NO: 5500 - DNA, 13 bp, Artificial Sequence
  Description of Artificial Sequence: Synthetic primer
tatacttgccttt

SEQ ID NO: 5501 - DNA, 13 bp, Artificial Sequence
  Description of Artificial Sequence: Synthetic primer
cgtcgaaaccatc

SEQ ID NO: 5502 - DNA, 13 bp, Artificial Sequence
  Description of Artificial Sequence: Synthetic primer
gactgattgttag

SEQ ID NO: 5503 - DNA, 13 bp, Artificial Sequence
  Description of Artificial Sequence: Synthetic primer
atccagatacgca

SEQ ID NO: 5504 - DNA, 13 bp, Artificial Sequence
  Description of Artificial Sequence: Synthetic primer
acatcccaatctc

SEQ ID NO: 5505 - DNA, 13 bp, Artificial Sequence
  Description of Artificial Sequence: Synthetic primer
ccatcattggcaa

SEQ ID NO: 5506 - DNA, 13 bp, Artificial Sequence
  Description of Artificial Sequence: Synthetic primer
ggtctcagcagtc

SEQ ID NO: 5507 - DNA, 13 bp, Artificial Sequence
  Description of Artificial Sequence: Synthetic primer
cgtcccaatctcg

SEQ ID NO: 5508 - DNA, 13 bp, Artificial Sequence
  Description of Artificial Sequence: Synthetic primer
atccatctgagtt

SEQ ID NO: 5509 - DNA, 13 bp, Artificial Sequence
  Description of Artificial Sequence: Synthetic primer
ccgaacagcgaca

SEQ ID NO: 5510 - DNA, 13 bp, Artificial Sequence
  Description of Artificial Sequence: Synthetic primer
ttcgctgtctgcc

SEQ ID NO: 5511 - DNA, 13 bp, Artificial Sequence
  Description of Artificial Sequence: Synthetic primer
gataaccagcggc

SEQ ID NO: 5512 - DNA, 13 bp, Artificial Sequence
  Description of Artificial Sequence: Synthetic primer
cgcccatgatgaa

SEQ ID NO: 5513 - DNA, 13 bp, Artificial Sequence
  Description of Artificial Sequence: Synthetic primer
ggaatttcttcta

SEQ ID NO: 5514 - DNA, 13 bp, Artificial Sequence
  Description of Artificial Sequence: Synthetic primer
acgacttcaaccg

SEQ ID NO: 5515 - DNA, 13 bp, Artificial Sequence
  Description of Artificial Sequence: Synthetic primer
ttaactcactact

SEQ ID NO: 5516 - DNA, 13 bp, Artificial Sequence
  Description of Artificial Sequence: Synthetic primer
attcttgaataca

SEQ ID NO: 5517 - DNA, 13 bp, Artificial Sequence
  Description of Artificial Sequence: Synthetic primer
cccacacctaaat

SEQ ID NO: 5518 - DNA, 13 bp, Artificial Sequence
  Description of Artificial Sequence: Synthetic primer
acagattttacag

SEQ ID NO: 5519 - DNA, 13 bp, Artificial Sequence
  Description of Artificial Sequence: Synthetic primer
ttcctggtgatgt

SEQ ID NO: 5520 - DNA, 13 bp, Artificial Sequence
  Description of Artificial Sequence: Synthetic primer
atgtactttcctt

SEQ ID NO: 5521 - DNA, 13 bp, Artificial Sequence
  Description of Artificial Sequence: Synthetic primer
gatggcgttcttc

SEQ ID NO: 5522 - DNA, 13 bp, Artificial Sequence
  Description of Artificial Sequence: Synthetic primer
ccaacgttacttg

SEQ ID NO: 5523 - DNA, 13 bp, Artificial Sequence
  Description of Artificial Sequence: Synthetic primer
tcctcgatctgca

SEQ ID NO: 5524 - DNA, 13 bp, Artificial Sequence
  Description of Artificial Sequence: Synthetic primer
cagtttcatgaaa

SEQ ID NO: 5525 - DNA, 13 bp, Artificial Sequence
  Description of Artificial Sequence: Synthetic primer
gttcctgttccca

SEQ ID NO: 5526 - DNA, 13 bp, Artificial Sequence
  Description of Artificial Sequence: Synthetic primer
tacgcacaccgat

SEQ ID NO: 5527 - DNA, 13 bp, Artificial Sequence
  Description of Artificial Sequence: Synthetic primer
gcgtgggtgatcg

SEQ ID NO: 5528 - DNA, 13 bp, Artificial Sequence
  Description of Artificial Sequence: Synthetic primer
ctttctgcgtacg

SEQ ID NO: 5529 - DNA, 13 bp, Artificial Sequence
  Description of Artificial Sequence: Synthetic primer
attaggcagtaag

SEQ ID NO: 5530 - DNA, 13 bp, Artificial Sequence
  Description of Artificial Sequence: Synthetic primer
caaactatagcaa

SEQ ID NO: 5531 - DNA, 13 bp, Artificial Sequence
  Description of Artificial Sequence: Synthetic primer
accatctgaccat

SEQ ID NO: 5532 - DNA, 13 bp, Artificial Sequence
  Description of Artificial Sequence: Synthetic primer
ggccgatcttcgc

SEQ ID NO: 5533 - DNA, 13 bp, Artificial Sequence
  Description of Artificial Sequence: Synthetic primer
ctcctttcaaaat

SEQ ID NO: 5534 - DNA, 13 bp, Artificial Sequence
  Description of Artificial Sequence: Synthetic primer
ccatgccgaacat

SEQ ID NO: 5535 - DNA, 13 bp, Artificial Sequence
  Description of Artificial Sequence: Synthetic primer
accttatctatac

SEQ ID NO: 5536 - DNA, 13 bp, Artificial Sequence
  Description of Artificial Sequence: Synthetic primer
agcccgctccaag

SEQ ID NO: 5537 - DNA, 13 bp, Artificial Sequence
  Description of Artificial Sequence: Synthetic primer
gttacatacaaga

SEQ ID NO: 5538 - DNA, 13 bp, Artificial Sequence
  Description of Artificial Sequence: Synthetic primer
caagaatgcgcca

SEQ ID NO: 5539 - DNA, 13 bp, Artificial Sequence
  Description of Artificial Sequence: Synthetic primer
accagcgcgcctt

SEQ ID NO: 5540 - DNA, 13 bp, Artificial Sequence
  Description of Artificial Sequence: Synthetic primer
ttctgcggatcga

SEQ ID NO: 5541 - DNA, 13 bp, Artificial Sequence
  Description of Artificial Sequence: Synthetic primer
gcggtcttgttcg

SEQ ID NO: 5542 - DNA, 13 bp, Artificial Sequence
  Description of Artificial Sequence: Synthetic primer
atctctgtgattt

SEQ ID NO: 5543 - DNA, 13 bp, Artificial Sequence
  Description of Artificial Sequence: Synthetic primer
ttgcctctgcaat

SEQ ID NO: 5544 - DNA, 13 bp, Artificial Sequence
  Description of Artificial Sequence: Synthetic primer
agttctacaagca

SEQ ID NO: 5545 - DNA, 13 bp, Artificial Sequence
  Description of Artificial Sequence: Synthetic primer
cttcagccgcctc

SEQ ID NO: 5546 - DNA, 13 bp, Artificial Sequence
  Description of Artificial Sequence: Synthetic primer
ggcaccatctcgc

SEQ ID NO: 5547 - DNA, 13 bp, Artificial Sequence
  Description of Artificial Sequence: Synthetic primer
gccggcttgttgt

SEQ ID NO: 5548 - DNA, 13 bp, Artificial Sequence
  Description of Artificial Sequence: Synthetic primer
accagctctcata

SEQ ID NO: 5549 - DNA, 13 bp, Artificial Sequence
  Description of Artificial Sequence: Synthetic primer
aggaacacgagca

SEQ ID NO: 5550 - DNA, 13 bp, Artificial Sequence
  Description of Artificial Sequence: Synthetic primer
tagcatctcccat

SEQ ID NO: 5551 - DNA, 13 bp, Artificial Sequence
  Description of Artificial Sequence: Synthetic primer
ccatcttcatttt

SEQ ID NO: 5552 - DNA, 13 bp, Artificial Sequence
  Description of Artificial Sequence: Synthetic primer
agccagatacgca

SEQ ID NO: 5553 - DNA, 13 bp, Artificial Sequence
  Description of Artificial Sequence: Synthetic primer
tataaattttggc

SEQ ID NO: 5554 - DNA, 13 bp, Artificial Sequence
  Description of Artificial Sequence: Synthetic primer
ctgggtctccatg

SEQ ID NO: 5555 - DNA, 13 bp, Artificial Sequence
  Description of Artificial Sequence: Synthetic primer
ctgcgtggcaaaa

SEQ ID NO: 5556 - DNA, 13 bp, Artificial Sequence
  Description of Artificial Sequence: Synthetic primer
ggcctgctcatag

SEQ ID NO: 5557 - DNA, 13 bp, Artificial Sequence
  Description of Artificial Sequence: Synthetic primer
aaaggcgaatata

SEQ ID NO: 5558 - DNA, 13 bp, Artificial Sequence
  Description of Artificial Sequence: Synthetic primer
atgttacgcagca

SEQ ID NO: 5559 - DNA, 13 bp, Artificial Sequence
  Description of Artificial Sequence: Synthetic primer
gcgatatactttt

SEQ ID NO: 5560 - DNA, 13 bp, Artificial Sequence
  Description of Artificial Sequence: Synthetic primer
accatttagcaaa

SEQ ID NO: 5561 - DNA, 13 bp, Artificial Sequence
  Description of Artificial Sequence: Synthetic primer
aacgtttgaaata

SEQ ID NO: 5562 - DNA, 13 bp, Artificial Sequence
  Description of Artificial Sequence: Synthetic primer
gcaggatgtcgtc

SEQ ID NO: 5563 - DNA, 13 bp, Artificial Sequence
  Description of Artificial Sequence: Synthetic primer
aatcttacagtcc

SEQ ID NO: 5564 - DNA, 13 bp, Artificial Sequence
  Description of Artificial Sequence: Synthetic primer
tgtcctatcagga

SEQ ID NO: 5565 - DNA, 13 bp, Artificial Sequence
  Description of Artificial Sequence: Synthetic primer
tggaccgacctga

SEQ ID NO: 5566 - DNA, 13 bp, Artificial Sequence
  Description of Artificial Sequence: Synthetic primer
taaatatttcctg

SEQ ID NO: 5567 - DNA, 13 bp, Artificial Sequence
  Description of Artificial Sequence: Synthetic primer
acttcgcctgggt

SEQ ID NO: 5568 - DNA, 13 bp, Artificial Sequence
  Description of Artificial Sequence: Synthetic primer
acacccatgatga

SEQ ID NO: 5569 - DNA, 13 bp, Artificial Sequence
  Description of Artificial Sequence: Synthetic primer
tacctgcgcctgc

SEQ ID NO: 5570 - DNA, 13 bp, Artificial Sequence
  Description of Artificial Sequence: Synthetic primer
gccagcaccagga

SEQ ID NO: 5571 - DNA, 13 bp, Artificial Sequence
  Description of Artificial Sequence: Synthetic primer
ccgacatcgaaac

SEQ ID NO: 5572 - DNA, 13 bp, Artificial Sequence
  Description of Artificial Sequence: Synthetic primer
acgactttatcga

SEQ ID NO: 5573 - DNA, 13 bp, Artificial Sequence
  Description of Artificial Sequence: Synthetic primer
gtttgaaccatgt

SEQ ID NO: 5574 - DNA, 13 bp, Artificial Sequence
  Description of Artificial Sequence: Synthetic primer
ttcgttatttaca

SEQ ID NO: 5575 - DNA, 13 bp, Artificial Sequence
  Description of Artificial Sequence: Synthetic primer
tcatcgcctcttc

SEQ ID NO: 5576 - DNA, 13 bp, Artificial Sequence
  Description of Artificial Sequence: Synthetic primer
ttgatgtttggtg

SEQ ID NO: 5577 - DNA, 13 bp, Artificial Sequence
  Description of Artificial Sequence: Synthetic primer
tggccgatctgct

SEQ ID NO: 5578 - DNA, 13 bp, Artificial Sequence
  Description of Artificial Sequence: Synthetic primer
gtgatgttctggc

SEQ ID NO: 5579 - DNA, 13 bp, Artificial Sequence
  Description of Artificial Sequence: Synthetic primer
cagctttcataca

SEQ ID NO: 5580 - DNA, 13 bp, Artificial Sequence
  Description of Artificial Sequence: Synthetic primer
caacaggtaatga

SEQ ID NO: 5581 - DNA, 13 bp, Artificial Sequence
  Description of Artificial Sequence: Synthetic primer
ttatcacttggga

SEQ ID NO: 5582 - DNA, 13 bp, Artificial Sequence
  Description of Artificial Sequence: Synthetic primer
ggttacgcgcctg

SEQ ID NO: 5583 - DNA, 13 bp, Artificial Sequence
  Description of Artificial Sequence: Synthetic primer
acaattgctaccg

SEQ ID NO: 5584 - DNA, 13 bp, Artificial Sequence
  Description of Artificial Sequence: Synthetic primer
tcaccaccatgat

SEQ ID NO: 5585 - DNA, 13 bp, Artificial Sequence
  Description of Artificial Sequence: Synthetic primer
cgtttccttgaac

SEQ ID NO: 5586 - DNA, 13 bp, Artificial Sequence
  Description of Artificial Sequence: Synthetic primer
cggcggccatgat

SEQ ID NO: 5587 - DNA, 13 bp, Artificial Sequence
  Description of Artificial Sequence: Synthetic primer
cagcgcgctgcaa

SEQ ID NO: 5588 - DNA, 13 bp, Artificial Sequence
  Description of Artificial Sequence: Synthetic primer
gggtgatgcggtt

SEQ ID NO: 5589 - DNA, 13 bp, Artificial Sequence
  Description of Artificial Sequence: Synthetic primer
gacgtgcgcgaac

SEQ ID NO: 5590 - DNA, 13 bp, Artificial Sequence
  Description of Artificial Sequence: Synthetic primer
tatagatcgccct

SEQ ID NO: 5591 - DNA, 13 bp, Artificial Sequence
  Description of Artificial Sequence: Synthetic primer
gtttccttggcca

SEQ ID NO: 5592 - DNA, 13 bp, Artificial Sequence
  Description of Artificial Sequence: Synthetic primer
agcaaactcattc

SEQ ID NO: 5593 - DNA, 13 bp, Artificial Sequence
  Description of Artificial Sequence: Synthetic primer
aaatgtaattggt

SEQ ID NO: 5594 - DNA, 13 bp, Artificial Sequence
  Description of Artificial Sequence: Synthetic primer
cggcgatcttcag

SEQ ID NO: 5595 - DNA, 13 bp, Artificial Sequence
  Description of Artificial Sequence: Synthetic primer
gcaaatgaagaaa

SEQ ID NO: 5596 - DNA, 13 bp, Artificial Sequence
  Description of Artificial Sequence: Synthetic primer
gggtttccataaa

SEQ ID NO: 5597 - DNA, 13 bp, Artificial Sequence
  Description of Artificial Sequence: Synthetic primer
ataaactggaaac

SEQ ID NO: 5598 - DNA, 13 bp, Artificial Sequence
  Description of Artificial Sequence: Synthetic primer
ttcaatggtatat

SEQ ID NO: 5599 - DNA, 13 bp, Artificial Sequence
  Description of Artificial Sequence: Synthetic primer
ttccatgaataga

SEQ ID NO: 5600 - DNA, 13 bp, Artificial Sequence
  Description of Artificial Sequence: Synthetic primer
ctgttcgctattg

SEQ ID NO: 5601 - DNA, 13 bp, Artificial Sequence
  Description of Artificial Sequence: Synthetic primer
aggtcgcggtcat

SEQ ID NO: 5602 - DNA, 13 bp, Artificial Sequence
  Description of Artificial Sequence: Synthetic primer
agaaccaaccaag

SEQ ID NO: 5603 - DNA, 13 bp, Artificial Sequence
  Description of Artificial Sequence: Synthetic primer
catcacgccaaac

SEQ ID NO: 5604 - DNA, 13 bp, Artificial Sequence
  Description of Artificial Sequence: Synthetic primer
gataccttaccgc

SEQ ID NO: 5605 - DNA, 13 bp, Artificial Sequence
  Description of Artificial Sequence: Synthetic primer
tcggtgcggtcca

SEQ ID NO: 5606 - DNA, 13 bp, Artificial Sequence
  Description of Artificial Sequence: Synthetic primer
tgcttaatcagtg

SEQ ID NO: 5607 - DNA, 13 bp, Artificial Sequence
  Description of Artificial Sequence: Synthetic primer
cttttgccagatt

SEQ ID NO: 5608 - DNA, 13 bp, Artificial Sequence
  Description of Artificial Sequence: Synthetic primer
cagcggattataa

SEQ ID NO: 5609 - DNA, 13 bp, Artificial Sequence
  Description of Artificial Sequence: Synthetic primer
cagacgatggcat

SEQ ID NO: 5610 - DNA, 13 bp, Artificial Sequence
  Description of Artificial Sequence: Synthetic primer
gacattcaacgcc

SEQ ID NO: 5611 - DNA, 13 bp, Artificial Sequence
  Description of Artificial Sequence: Synthetic primer
tctcgcctttcac

SEQ ID NO: 5612 - DNA, 13 bp, Artificial Sequence
  Description of Artificial Sequence: Synthetic primer
ctccatgaccagg

SEQ ID NO: 5613 - DNA, 13 bp, Artificial Sequence
  Description of Artificial Sequence: Synthetic primer
cattggaacagct

SEQ ID NO: 5614 - DNA, 13 bp, Artificial Sequence
  Description of Artificial Sequence: Synthetic primer
gtctgcgccatcg

SEQ ID NO: 5615 - DNA, 13 bp, Artificial Sequence
  Description of Artificial Sequence: Synthetic primer
cccgactagataa

SEQ ID NO: 5616 - DNA, 13 bp, Artificial Sequence
  Description of Artificial Sequence: Synthetic primer
ccatgtgcggctt

SEQ ID NO: 5617 - DNA, 13 bp, Artificial Sequence
  Description of Artificial Sequence: Synthetic primer
gcgcgagcttgat

SEQ ID NO: 5618 - DNA, 13 bp, Artificial Sequence
  Description of Artificial Sequence: Synthetic primer
acgacttcaccaa

SEQ ID NO: 5619 - DNA, 13 bp, Artificial Sequence
  Description of Artificial Sequence: Synthetic primer
accgatcgttctg

SEQ ID NO: 5620 - DNA, 13 bp, Artificial Sequence
  Description of Artificial Sequence: Synthetic primer
gcatttcccagcc

SEQ ID NO: 5621 - DNA, 13 bp, Artificial Sequence
  Description of Artificial Sequence: Synthetic primer
tatgtggtagaga

SEQ ID NO: 5622 - DNA, 13 bp, Artificial Sequence
  Description of Artificial Sequence: Synthetic primer
gggtatggttcgt

SEQ ID NO: 5623 - DNA, 13 bp, Artificial Sequence
  Description of Artificial Sequence: Synthetic primer
taaacagcctcca

SEQ ID NO: 5624 - DNA, 13 bp, Artificial Sequence
  Description of Artificial Sequence: Synthetic primer
agcttggccgggt

SEQ ID NO: 5625 - DNA, 13 bp, Artificial Sequence
  Description of Artificial Sequence: Synthetic primer
tctggcatcgcca

SEQ ID NO: 5626 - DNA, 13 bp, Artificial Sequence
  Description of Artificial Sequence: Synthetic primer
aggtgctggtgga

SEQ ID NO: 5627 - DNA, 13 bp, Artificial Sequence
  Description of Artificial Sequence: Synthetic primer
accaccacaaaga

SEQ ID NO: 5628 - DNA, 13 bp, Artificial Sequence
  Description of Artificial Sequence: Synthetic primer
cttctcggtggca

SEQ ID NO: 5629 - DNA, 13 bp, Artificial Sequence
  Description of Artificial Sequence: Synthetic primer
cgcaggttatcga

SEQ ID NO: 5630 - DNA, 13 bp, Artificial Sequence
  Description of Artificial Sequence: Synthetic primer
tgattatcacgtt

SEQ ID NO: 5631 - DNA, 13 bp, Artificial Sequence
  Description of Artificial Sequence: Synthetic primer
gctgcatctttag

SEQ ID NO: 5632 - DNA, 13 bp, Artificial Sequence
  Description of Artificial Sequence: Synthetic primer
acgatatcgctat

SEQ ID NO: 5633 - DNA, 13 bp, Artificial Sequence
  Description of Artificial Sequence: Synthetic primer
cccttcggtcacg

SEQ ID NO: 5634 - DNA, 13 bp, Artificial Sequence
  Description of Artificial Sequence: Synthetic primer
ccaagacgttcca

SEQ ID NO: 5635 - DNA, 13 bp, Artificial Sequence
  Description of Artificial Sequence: Synthetic primer
acttggtttgttc

SEQ ID NO: 5636 - DNA, 13 bp, Artificial Sequence
  Description of Artificial Sequence: Synthetic primer
ttttctttccaaa

SEQ ID NO: 5637 - DNA, 13 bp, Artificial Sequence
  Description of Artificial Sequence: Synthetic primer
tggagcaggccat

SEQ ID NO: 5638 - DNA, 13 bp, Artificial Sequence
  Description of Artificial Sequence: Synthetic primer
ggttgccacggtc

SEQ ID NO: 5639 - DNA, 13 bp, Artificial Sequence
  Description of Artificial Sequence: Synthetic primer
cgcgcgctgatga

SEQ ID NO: 5640 - DNA, 13 bp, Artificial Sequence
  Description of Artificial Sequence: Synthetic primer
tggttcccgcagg

SEQ ID NO: 5641 - DNA, 13 bp, Artificial Sequence
  Description of Artificial Sequence: Synthetic primer
tcaacacccttaa

SEQ ID NO: 5642 - DNA, 13 bp, Artificial Sequence
  Description of Artificial Sequence: Synthetic primer
catggttccataa

SEQ ID NO: 5643 - DNA, 13 bp, Artificial Sequence
  Description of Artificial Sequence: Synthetic primer
ccgatggccttct

SEQ ID NO: 5644 - DNA, 13 bp, Artificial Sequence
  Description of Artificial Sequence: Synthetic primer
ccaccttcacgcg

SEQ ID NO: 5645 - DNA, 13 bp, Artificial Sequence
  Description of Artificial Sequence: Synthetic primer
acagcacgatgtc

SEQ ID NO: 5646 - DNA, 13 bp, Artificial Sequence
  Description of Artificial Sequence: Synthetic primer
cccagcacccagt

SEQ ID NO: 5647 - DNA, 13 bp, Artificial Sequence
  Description of Artificial Sequence: Synthetic primer
aaaaccaacctgg

SEQ ID NO: 5648 - DNA, 13 bp, Artificial Sequence
  Description of Artificial Sequence: Synthetic primer
tcggtgcggtcga

SEQ ID NO: 5649 - DNA, 13 bp, Artificial Sequence
  Description of Artificial Sequence: Synthetic primer
ggaacagcgcttc

SEQ ID NO: 5650 - DNA, 13 bp, Artificial Sequence
  Description of Artificial Sequence: Synthetic primer
acgtacttggctt

SEQ ID NO: 5651 - DNA, 13 bp, Artificial Sequence
  Description of Artificial Sequence: Synthetic primer
tcttcatcgatcg

SEQ ID NO: 5652 - DNA, 13 bp, Artificial Sequence
  Description of Artificial Sequence: Synthetic primer
ctttctgggcttc

SEQ ID NO: 5653 - DNA, 13 bp, Artificial Sequence
  Description of Artificial Sequence: Synthetic primer
agccatcacaaac

SEQ ID NO: 5654 - DNA, 13 bp, Artificial Sequence
  Description of Artificial Sequence: Synthetic primer
attgtcttgccga

SEQ ID NO: 5655 - DNA, 13 bp, Artificial Sequence
  Description of Artificial Sequence: Synthetic primer
cgaacagcatcac

SEQ ID NO: 5656 - DNA, 13 bp, Artificial Sequence
  Description of Artificial Sequence: Synthetic primer
tgcaggatcgcca

SEQ ID NO: 5657 - DNA, 13 bp, Artificial Sequence
  Description of Artificial Sequence: Synthetic primer
gacggaactgctg

SEQ ID NO: 5658 - DNA, 13 bp, Artificial Sequence
  Description of Artificial Sequence: Synthetic primer
acggatatgtatt

SEQ ID NO: 5659 - DNA, 13 bp, Artificial Sequence
  Description of Artificial Sequence: Synthetic primer
aagcagcaagcgc

SEQ ID NO: 5660 - DNA, 13 bp, Artificial Sequence
  Description of Artificial Sequence: Synthetic primer
agttcgccatctg

SEQ ID NO: 5661 - DNA, 13 bp, Artificial Sequence
  Description of Artificial Sequence: Synthetic primer
aggtcgttggtcg

SEQ ID NO: 5662 - DNA, 13 bp, Artificial Sequence
  Description of Artificial Sequence: Synthetic primer
aaaacgacgataa

SEQ ID NO: 5663 - DNA, 13 bp, Artificial Sequence
  Description of Artificial Sequence: Synthetic primer
attgaacgaccaa

SEQ ID NO: 5664 - DNA, 13 bp, Artificial Sequence
  Description of Artificial Sequence: Synthetic primer
tcggcatcaccct

SEQ ID NO: 5665 - DNA, 13 bp, Artificial Sequence
  Description of Artificial Sequence: Synthetic primer
gaaccaaataata

SEQ ID NO: 5666 - DNA, 13 bp, Artificial Sequence
  Description of Artificial Sequence: Synthetic primer
tgacggcattgct

SEQ ID NO: 5667 - DNA, 13 bp, Artificial Sequence
  Description of Artificial Sequence: Synthetic primer
tatctgttcctgc

SEQ ID NO: 5668 - DNA, 13 bp, Artificial Sequence
  Description of Artificial Sequence: Synthetic primer
gtgatgttcggct

SEQ ID NO: 5669 - DNA, 13 bp, Artificial Sequence
  Description of Artificial Sequence: Synthetic primer
gcctacgacgcca

SEQ ID NO: 5670 - DNA, 13 bp, Artificial Sequence
  Description of Artificial Sequence: Synthetic primer
gtctgcgtagtat

SEQ ID NO: 5671 - DNA, 13 bp, Artificial Sequence
  Description of Artificial Sequence: Synthetic primer
atcaccagcggca

SEQ ID NO: 5672 - DNA, 13 bp, Artificial Sequence
  Description of Artificial Sequence: Synthetic primer
atggtgttgttgc

SEQ ID NO: 5673 - DNA, 13 bp, Artificial Sequence
  Description of Artificial Sequence: Synthetic primer
aacgcagcggtgg

SEQ ID NO: 5674 - DNA, 13 bp, Artificial Sequence
  Description of Artificial Sequence: Synthetic primer
gccatcctacgca

SEQ ID NO: 5675 - DNA, 13 bp, Artificial Sequence
  Description of Artificial Sequence: Synthetic primer
ttatcaaccaagt

SEQ ID NO: 5676 - DNA, 13 bp, Artificial Sequence
  Description of Artificial Sequence: Synthetic primer
acaaataacttct

SEQ ID NO: 5677 - DNA, 13 bp, Artificial Sequence
  Description of Artificial Sequence: Synthetic primer
ttgctggaactgg

SEQ ID NO: 5678 - DNA, 13 bp, Artificial Sequence
  Description of Artificial Sequence: Synthetic primer
cgtaactctccca

SEQ ID NO: 5679 - DNA, 13 bp, Artificial Sequence
  Description of Artificial Sequence: Synthetic primer
cctgatgcgcttc

SEQ ID NO: 5680 - DNA, 13 bp, Artificial Sequence
  Description of Artificial Sequence: Synthetic primer
ggatcgacagcgg

SEQ ID NO: 5681 - DNA, 13 bp, Artificial Sequence
  Description of Artificial Sequence: Synthetic primer
tcttcttcggtca

SEQ ID NO: 5682 - DNA, 13 bp, Artificial Sequence
  Description of Artificial Sequence: Synthetic primer
tgacaatattatc

SEQ ID NO: 5683 - DNA, 13 bp, Artificial Sequence
  Description of Artificial Sequence: Synthetic primer
gcctggtcaatca

SEQ ID NO: 5684 - DNA, 13 bp, Artificial Sequence
  Description of Artificial Sequence: Synthetic primer
tcaatcagttcgg

SEQ ID NO: 5685 - DNA, 13 bp, Artificial Sequence
  Description of Artificial Sequence: Synthetic primer
aagcgatcagaca

SEQ ID NO: 5686 - DNA, 13 bp, Artificial Sequence
  Description of Artificial Sequence: Synthetic primer
tgacggtcgacac

SEQ ID NO: 5687 - DNA, 13 bp, Artificial Sequence
  Description of Artificial Sequence: Synthetic primer
ccccaaataacat

SEQ ID NO: 5688 - DNA, 13 bp, Artificial Sequence
  Description of Artificial Sequence: Synthetic primer
ggacataccactt

SEQ ID NO: 5689 - DNA, 13 bp, Artificial Sequence
  Description of Artificial Sequence: Synthetic primer
gttcatgcagaac

SEQ ID NO: 5690 - DNA, 13 bp, Artificial Sequence
  Description of Artificial Sequence: Synthetic primer
gccaacgaggacg

SEQ ID NO: 5691 - DNA, 13 bp, Artificial Sequence
  Description of Artificial Sequence: Synthetic primer
aaaggcacgaatc

SEQ ID NO: 5692 - DNA, 13 bp, Artificial Sequence
  Description of Artificial Sequence: Synthetic primer
cagtacctacaac

SEQ ID NO: 5693 - DNA, 13 bp, Artificial Sequence
  Description of Artificial Sequence: Synthetic primer
tggtcggggaaac

SEQ ID NO: 5694 - DNA, 13 bp, Artificial Sequence
  Description of Artificial Sequence: Synthetic primer
ccgttgatctgga

SEQ ID NO: 5695 - DNA, 13 bp, Artificial Sequence
  Description of Artificial Sequence: Synthetic primer
gccagcgacatcg

SEQ ID NO: 5696 - DNA, 13 bp, Artificial Sequence
  Description of Artificial Sequence: Synthetic primer
ccgaccggtttcg

SEQ ID NO: 5697 - DNA, 13 bp, Artificial Sequence
  Description of Artificial Sequence: Synthetic primer
gatggcactggtc

SEQ ID NO: 5698 - DNA, 13 bp, Artificial Sequence
  Description of Artificial Sequence: Synthetic primer
cagttgctggcgc

SEQ ID NO: 5699 - DNA, 13 bp, Artificial Sequence
  Description of Artificial Sequence: Synthetic primer
cttctgaaacata

SEQ ID NO: 5700 - DNA, 13 bp, Artificial Sequence
  Description of Artificial Sequence: Synthetic primer
ctgcgaaatttcg

SEQ ID NO: 5701 - DNA, 13 bp, Artificial Sequence
  Description of Artificial Sequence: Synthetic primer
aaacgcttcgggc

SEQ ID NO: 5702 - DNA, 13 bp, Artificial Sequence
  Description of Artificial Sequence: Synthetic primer
acgtcaacgatgg

SEQ ID NO: 5703 - DNA, 13 bp, Artificial Sequence
  Description of Artificial Sequence: Synthetic primer
catcaaaggttgg

SEQ ID NO: 5704 - DNA, 13 bp, Artificial Sequence
  Description of Artificial Sequence: Synthetic primer
ttcagtttcttga

SEQ ID NO: 5705 - DNA, 13 bp, Artificial Sequence
  Description of Artificial Sequence: Synthetic primer
agagtaagtagtt

SEQ ID NO: 5706 - DNA, 13 bp, Artificial Sequence
  Description of Artificial Sequence: Synthetic primer
tcattgacgtccc

SEQ ID NO: 5707 - DNA, 13 bp, Artificial Sequence
  Description of Artificial Sequence: Synthetic primer
ttgtttgaggtga

SEQ ID NO: 5708 - DNA, 13 bp, Artificial Sequence
  Description of Artificial Sequence: Synthetic primer
gtgatatgcacat

SEQ ID NO: 5709 - DNA, 13 bp, Artificial Sequence
  Description of Artificial Sequence: Synthetic primer
acttcgttcgcca

SEQ ID NO: 5710 - DNA, 13 bp, Artificial Sequence
  Description of Artificial Sequence: Synthetic primer
agttccggcatac

SEQ ID NO: 5711 - DNA, 13 bp, Artificial Sequence
  Description of Artificial Sequence: Synthetic primer
ggcgtcaggatca

SEQ ID NO: 5712 - DNA, 13 bp, Artificial Sequence
  Description of Artificial Sequence: Synthetic primer
cgcaggtcgtcga

SEQ ID NO: 5713 - DNA, 13 bp, Artificial Sequence
  Description of Artificial Sequence: Synthetic primer
aggaagatatcgc

SEQ ID NO: 5714 - DNA, 13 bp, Artificial Sequence
  Description of Artificial Sequence: Synthetic primer
atggtaaccatca

SEQ ID NO: 5715 - DNA, 13 bp, Artificial Sequence
  Description of Artificial Sequence: Synthetic primer
acctcaaaactgg

SEQ ID NO: 5716 - DNA, 13 bp, Artificial Sequence
  Description of Artificial Sequence: Synthetic primer
tagctggcgatca

SEQ ID NO: 5717 - DNA, 13 bp, Artificial Sequence
  Description of Artificial Sequence: Synthetic primer
atatgcactcgct

SEQ ID NO: 5718 - DNA, 13 bp, Artificial Sequence
  Description of Artificial Sequence: Synthetic primer
catatatttctct

SEQ ID NO: 5719 - DNA, 13 bp, Artificial Sequence
  Description of Artificial Sequence: Synthetic primer
cttcgtagccatt

SEQ ID NO: 5720 - DNA, 13 bp, Artificial Sequence
  Description of Artificial Sequence: Synthetic primer
cagaacgaatggt

SEQ ID NO: 5721 - DNA, 13 bp, Artificial Sequence
  Description of Artificial Sequence: Synthetic primer
ttgtcacctggtt

SEQ ID NO: 5722 - DNA, 13 bp, Artificial Sequence
  Description of Artificial Sequence: Synthetic primer
aaaagcggaaaac

SEQ ID NO: 5723 - DNA, 13 bp, Artificial Sequence
  Description of Artificial Sequence: Synthetic primer
accagcagatcct

SEQ ID NO: 5724 - DNA, 13 bp, Artificial Sequence
  Description of Artificial Sequence: Synthetic primer
tctttactagata

SEQ ID NO: 5725 - DNA, 13 bp, Artificial Sequence
  Description of Artificial Sequence: Synthetic primer
gtcctcccgcaaa

SEQ ID NO: 5726 - DNA, 13 bp, Artificial Sequence
  Description of Artificial Sequence: Synthetic primer
cgggatcgaccag

SEQ ID NO: 5727 - DNA, 13 bp, Artificial Sequence
  Description of Artificial Sequence: Synthetic primer
tttatccattatc

SEQ ID NO: 5728 - DNA, 13 bp, Artificial Sequence
  Description of Artificial Sequence: Synthetic primer
agaccgtgcagga

SEQ ID NO: 5729 - DNA, 13 bp, Artificial Sequence
  Description of Artificial Sequence: Synthetic primer
agtgctcgatcag

SEQ ID NO: 5730 - DNA, 13 bp, Artificial Sequence
  Description of Artificial Sequence: Synthetic primer
gctgcctgcagtt

SEQ ID NO: 5731 - DNA, 13 bp, Artificial Sequence
  Description of Artificial Sequence: Synthetic primer
accatcgccagca

SEQ ID NO: 5732 - DNA, 13 bp, Artificial Sequence
  Description of Artificial Sequence: Synthetic primer
acctcatccagca

SEQ ID NO: 5733 - DNA, 13 bp, Artificial Sequence
  Description of Artificial Sequence: Synthetic primer
gaacaaccgcgac

SEQ ID NO: 5734 - DNA, 13 bp, Artificial Sequence
  Description of Artificial Sequence: Synthetic primer
cagcgacaccacc

SEQ ID NO: 5735 - DNA, 13 bp, Artificial Sequence
  Description of Artificial Sequence: Synthetic primer
gactgagcgattt

SEQ ID NO: 5736 - DNA, 13 bp, Artificial Sequence
  Description of Artificial Sequence: Synthetic primer
gccagcatcacga

SEQ ID NO: 5737 - DNA, 13 bp, Artificial Sequence
  Description of Artificial Sequence: Synthetic primer
tgtgcaccagaac

SEQ ID NO: 5738 - DNA, 13 bp, Artificial Sequence
  Description of Artificial Sequence: Synthetic primer
acttccttgatca

SEQ ID NO: 5739 - DNA, 13 bp, Artificial Sequence
  Description of Artificial Sequence: Synthetic primer
actggaaaagaaa

SEQ ID NO: 5740 - DNA, 13 bp, Artificial Sequence
  Description of Artificial Sequence: Synthetic primer
attttcgccgccg

SEQ ID NO: 5741 - DNA, 13 bp, Artificial Sequence
  Description of Artificial Sequence: Synthetic primer
ttcaatctggtta

SEQ ID NO: 5742 - DNA, 13 bp, Artificial Sequence
  Description of Artificial Sequence: Synthetic primer
ttcgcctttaact

SEQ ID NO: 5743 - DNA, 13 bp, Artificial Sequence
  Description of Artificial Sequence: Synthetic primer
atgaatatcctcg

SEQ ID NO: 5744 - DNA, 13 bp, Artificial Sequence
  Description of Artificial Sequence: Synthetic primer
tcgccatggacct

SEQ ID NO: 5745 - DNA, 13 bp, Artificial Sequence
  Description of Artificial Sequence: Synthetic primer
atttgcgtcactt

SEQ ID NO: 5746 - DNA, 13 bp, Artificial Sequence
  Description of Artificial Sequence: Synthetic primer
aatacatcgcgac

SEQ ID NO: 5747 - DNA, 13 bp, Artificial Sequence
  Description of Artificial Sequence: Synthetic primer
gccatcttcaccg

SEQ ID NO: 5748 - DNA, 13 bp, Artificial Sequence
  Description of Artificial Sequence: Synthetic primer
acttcatcgaccg

SEQ ID NO: 5749 - DNA, 13 bp, Artificial Sequence
  Description of Artificial Sequence: Synthetic primer
cagcttgcgcagg

SEQ ID NO: 5750 - DNA, 13 bp, Artificial Sequence
  Description of Artificial Sequence: Synthetic primer
cgcttgcggcttg

SEQ ID NO: 5751 - DNA, 13 bp, Artificial Sequence
  Description of Artificial Sequence: Synthetic primer
tctcagttaaaca

SEQ ID NO: 5752 - DNA, 13 bp, Artificial Sequence
  Description of Artificial Sequence: Synthetic primer
gcgcaggacaagg

SEQ ID NO: 5753 - DNA, 13 bp, Artificial Sequence
  Description of Artificial Sequence: Synthetic primer
gcattgcataaga

SEQ ID NO: 5754 - DNA, 13 bp, Artificial Sequence
  Description of Artificial Sequence: Synthetic primer
tgtcgatggacac

SEQ ID NO: 5755 - DNA, 13 bp, Artificial Sequence
  Description of Artificial Sequence: Synthetic primer
aagatgtggctat

SEQ ID NO: 5756 - DNA, 13 bp, Artificial Sequence
  Description of Artificial Sequence: Synthetic primer
gatcattccgctg

SEQ ID NO: 5757 - DNA, 13 bp, Artificial Sequence
  Description of Artificial Sequence: Synthetic primer
gctgctgtaaatt

SEQ ID NO: 5758 - DNA, 13 bp, Artificial Sequence
  Description of Artificial Sequence: Synthetic primer
ccccgaatatcta

SEQ ID NO: 5759 - DNA, 13 bp, Artificial Sequence
  Description of Artificial Sequence: Synthetic primer
ccttatggtcaac

SEQ ID NO: 5760 - DNA, 13 bp, Artificial Sequence
  Description of Artificial Sequence: Synthetic primer
ctgctgaaggtga

SEQ ID NO: 5761 - DNA, 13 bp, Artificial Sequence
  Description of Artificial Sequence: Synthetic primer
acgctctgcatcg

SEQ ID NO: 5762 - DNA, 13 bp, Artificial Sequence
  Description of Artificial Sequence: Synthetic primer
gttaacccatttc

SEQ ID NO: 5763 - DNA, 13 bp, Artificial Sequence
  Description of Artificial Sequence: Synthetic primer
tgttcaccgagaa

SEQ ID NO: 5764 - DNA, 13 bp, Artificial Sequence
  Description of Artificial Sequence: Synthetic primer
gcagggttcatag

SEQ ID NO: 5765 - DNA, 13 bp, Artificial Sequence
  Description of Artificial Sequence: Synthetic primer
ctttctgggtacg

SEQ ID NO: 5766 - DNA, 13 bp, Artificial Sequence
  Description of Artificial Sequence: Synthetic primer
aacgcctgaaggt

SEQ ID NO: 5767 - DNA, 13 bp, Artificial Sequence
  Description of Artificial Sequence: Synthetic primer
gaaaagagtattt

SEQ ID NO: 5768 - DNA, 13 bp, Artificial Sequence
  Description of Artificial Sequence: Synthetic primer
agcctgcagcagc

SEQ ID NO: 5769 - DNA, 13 bp, Artificial Sequence
  Description of Artificial Sequence: Synthetic primer
tgcggcgtaacaa

SEQ ID NO: 5770 - DNA, 13 bp, Artificial Sequence
  Description of Artificial Sequence: Synthetic primer
atagccgcagata

SEQ ID NO: 5771 - DNA, 13 bp, Artificial Sequence
  Description of Artificial Sequence: Synthetic primer
aggaacagcggca

SEQ ID NO: 5772 - DNA, 13 bp, Artificial Sequence
  Description of Artificial Sequence: Synthetic primer
agcaaatactctt

SEQ ID NO: 5773 - DNA, 13 bp, Artificial Sequence
  Description of Artificial Sequence: Synthetic primer
aatcatacgaata

SEQ ID NO: 5774 - DNA, 13 bp, Artificial Sequence
  Description of Artificial Sequence: Synthetic primer
atccttacttctt

SEQ ID NO: 5775 - DNA, 13 bp, Artificial Sequence
  Description of Artificial Sequence: Synthetic primer
gccagcgcatcca

SEQ ID NO: 5776 - DNA, 13 bp, Artificial Sequence
  Description of Artificial Sequence: Synthetic primer
aacccggctctcg

SEQ ID NO: 5777 - DNA, 13 bp, Artificial Sequence
  Description of Artificial Sequence: Synthetic primer
cgcaggagtggtg

SEQ ID NO: 5778 - DNA, 13 bp, Artificial Sequence
  Description of Artificial Sequence: Synthetic primer
atgcgtgctaagg

SEQ ID NO: 5779 - DNA, 13 bp, Artificial Sequence
  Description of Artificial Sequence: Synthetic primer
gcctgttcccgca

SEQ ID NO: 5780 - DNA, 13 bp, Artificial Sequence
  Description of Artificial Sequence: Synthetic primer
gatttatggggaa

SEQ ID NO: 5781 - DNA, 13 bp, Artificial Sequence
  Description of Artificial Sequence: Synthetic primer
gatcgcgtagtcg

SEQ ID NO: 5782 - DNA, 13 bp, Artificial Sequence
  Description of Artificial Sequence: Synthetic primer
ataaagaatgaac

SEQ ID NO: 5783 - DNA, 13 bp, Artificial Sequence
  Description of Artificial Sequence: Synthetic primer
aatgcggattcag

SEQ ID NO: 5784 - DNA, 13 bp, Artificial Sequence
  Description of Artificial Sequence: Synthetic primer
cgcaaaacctgcg

SEQ ID NO: 5785 - DNA, 13 bp, Artificial Sequence
  Description of Artificial Sequence: Synthetic primer
atttcgccgttgg

SEQ ID NO: 5786 - DNA, 13 bp, Artificial Sequence
  Description of Artificial Sequence: Synthetic primer
gataagccgcttg

SEQ ID NO: 5787 - DNA, 13 bp, Artificial Sequence
  Description of Artificial Sequence: Synthetic primer
aatctggtgctgg

SEQ ID NO: 5788 - DNA, 13 bp, Artificial Sequence
  Description of Artificial Sequence: Synthetic primer
ttgccatctgctc

SEQ ID NO: 5789 - DNA, 13 bp, Artificial Sequence
  Description of Artificial Sequence: Synthetic primer
ctgctgatcaccg

SEQ ID NO: 5790 - DNA, 13 bp, Artificial Sequence
  Description of Artificial Sequence: Synthetic primer
cttctgactgagc

SEQ ID NO: 5791 - DNA, 13 bp, Artificial Sequence
  Description of Artificial Sequence: Synthetic primer
cagcaataaacca

SEQ ID NO: 5792 - DNA, 13 bp, Artificial Sequence
  Description of Artificial Sequence: Synthetic primer
gtaattctgagca

SEQ ID NO: 5793 - DNA, 13 bp, Artificial Sequence
  Description of Artificial Sequence: Synthetic primer
gttgagcctggtg

SEQ ID NO: 5794 - DNA, 13 bp, Artificial Sequence
  Description of Artificial Sequence: Synthetic primer
ggcaatgccagac

SEQ ID NO: 5795 - DNA, 13 bp, Artificial Sequence
  Description of Artificial Sequence: Synthetic primer
ctaataccggtgt

SEQ ID NO: 5796 - DNA, 13 bp, Artificial Sequence
  Description of Artificial Sequence: Synthetic primer
aattcagaggctg

SEQ ID NO: 5797 - DNA, 13 bp, Artificial Sequence
  Description of Artificial Sequence: Synthetic primer
gtagctgtccagt

SEQ ID NO: 5798 - DNA, 13 bp, Artificial Sequence
  Description of Artificial Sequence: Synthetic primer
atcgttctaatag

SEQ ID NO: 5799 - DNA, 13 bp, Artificial Sequence
  Description of Artificial Sequence: Synthetic primer
gcaattcgcgatg

SEQ ID NO: 5800 - DNA, 13 bp, Artificial Sequence
  Description of Artificial Sequence: Synthetic primer
gacagcttccaac

SEQ ID NO: 5801 - DNA, 13 bp, Artificial Sequence
  Description of Artificial Sequence: Synthetic primer
agaaacgtcaatt

SEQ ID NO: 5802 - DNA, 13 bp, Artificial Sequence
  Description of Artificial Sequence: Synthetic primer
ctcataacagtag

SEQ ID NO: 5803 - DNA, 13 bp, Artificial Sequence
  Description of Artificial Sequence: Synthetic primer
tctggctgaactg

SEQ ID NO: 5804 - DNA, 13 bp, Artificial Sequence
  Description of Artificial Sequence: Synthetic primer
acaaagatgttgc

SEQ ID NO: 5805 - DNA, 13 bp, Artificial Sequence
  Description of Artificial Sequence: Synthetic primer
aataatagagtcc

SEQ ID NO: 5806 - DNA, 13 bp, Artificial Sequence
  Description of Artificial Sequence: Synthetic primer
gcaaagctttctt

SEQ ID NO: 5807 - DNA, 13 bp, Artificial Sequence
  Description of Artificial Sequence: Synthetic primer
aaacgcttttcgg

SEQ ID NO: 5808 - DNA, 13 bp, Artificial Sequence
  Description of Artificial Sequence: Synthetic primer
tggtggcgcacag

SEQ ID NO: 5809 - DNA, 13 bp, Artificial Sequence
  Description of Artificial Sequence: Synthetic primer
gtcagaatcagtg

SEQ ID NO: 5810 - DNA, 13 bp, Artificial Sequence
  Description of Artificial Sequence: Synthetic primer
tcatctgccagga

SEQ ID NO: 5811 - DNA, 13 bp, Artificial Sequence
  Description of Artificial Sequence: Synthetic primer
tgaggggttaaca

SEQ ID NO: 5812 - DNA, 13 bp, Artificial Sequence
  Description of Artificial Sequence: Synthetic primer
cctgtcaggtaac

SEQ ID NO: 5813 - DNA, 13 bp, Artificial Sequence
  Description of Artificial Sequence: Synthetic primer
gaagcgcgtcagt

SEQ ID NO: 5814 - DNA, 13 bp, Artificial Sequence
  Description of Artificial Sequence: Synthetic primer
atcaatatcggga

SEQ ID NO: 5815 - DNA, 13 bp, Artificial Sequence
  Description of Artificial Sequence: Synthetic primer
cgcttttagaacg

SEQ ID NO: 5816 - DNA, 13 bp, Artificial Sequence
  Description of Artificial Sequence: Synthetic primer
cgggtcagtatcc

SEQ ID NO: 5817 - DNA, 13 bp, Artificial Sequence
  Description of Artificial Sequence: Synthetic primer
cagcacgaacagg

SEQ ID NO: 5818 - DNA, 13 bp, Artificial Sequence
  Description of Artificial Sequence: Synthetic primer
atatacgattctg

SEQ ID NO: 5819 - DNA, 13 bp, Artificial Sequence
  Description of Artificial Sequence: Synthetic primer
ttgattgccgcca

SEQ ID NO: 5820 - DNA, 13 bp, Artificial Sequence
  Description of Artificial Sequence: Synthetic primer
tgccgccctaact

SEQ ID NO: 5821 - DNA, 13 bp, Artificial Sequence
  Description of Artificial Sequence: Synthetic primer
gctatggcaatat

SEQ ID NO: 5822 - DNA, 13 bp, Artificial Sequence
  Description of Artificial Sequence: Synthetic primer
agctgcgccttcg

SEQ ID NO: 5823 - DNA, 13 bp, Artificial Sequence
  Description of Artificial Sequence: Synthetic primer
cacggactgctgc

SEQ ID NO: 5824 - DNA, 13 bp, Artificial Sequence
  Description of Artificial Sequence: Synthetic primer
gctgcatcttcta

SEQ ID NO: 5825 - DNA, 13 bp, Artificial Sequence
  Description of Artificial Sequence: Synthetic primer
ttggagcggcagc

SEQ ID NO: 5826 - DNA, 13 bp, Artificial Sequence
  Description of Artificial Sequence: Synthetic primer
ctcgggatatctt

SEQ ID NO: 5827 - DNA, 13 bp, Artificial Sequence
  Description of Artificial Sequence: Synthetic primer
ctggtcgggtact

SEQ ID NO: 5828 - DNA, 13 bp, Artificial Sequence
  Description of Artificial Sequence: Synthetic primer
tgccgcaactttc

SEQ ID NO: 5829 - DNA, 13 bp, Artificial Sequence
  Description of Artificial Sequence: Synthetic primer
catttggatagct

SEQ ID NO: 5830 - DNA, 13 bp, Artificial Sequence
  Description of Artificial Sequence: Synthetic primer
tccagcagcagca

SEQ ID NO: 5831 - DNA, 13 bp, Artificial Sequence
  Description of Artificial Sequence: Synthetic primer
tcattgggtcgaa

SEQ ID NO: 5832 - DNA, 13 bp, Artificial Sequence
  Description of Artificial Sequence: Synthetic primer
atgtaacagaaaa

SEQ ID NO: 5833 - DNA, 13 bp, Artificial Sequence
  Description of Artificial Sequence: Synthetic primer
atattttcttctc

SEQ ID NO: 5834 - DNA, 13 bp, Artificial Sequence
  Description of Artificial Sequence: Synthetic primer
attaaagagaaac

SEQ ID NO: 5835 - DNA, 13 bp, Artificial Sequence
  Description of Artificial Sequence: Synthetic primer
cgaaattgaatca

SEQ ID NO: 5836 - DNA, 13 bp, Artificial Sequence
  Description of Artificial Sequence: Synthetic primer
acgaatgtctcct

SEQ ID NO: 5837 - DNA, 13 bp, Artificial Sequence
  Description of Artificial Sequence: Synthetic primer
ttgtgcaggcttt

SEQ ID NO: 5838 - DNA, 13 bp, Artificial Sequence
  Description of Artificial Sequence: Synthetic primer
tcccacatcagat

SEQ ID NO: 5839 - DNA, 13 bp, Artificial Sequence
  Description of Artificial Sequence: Synthetic primer
tatctatccgact

SEQ ID NO: 5840 - DNA, 13 bp, Artificial Sequence
  Description of Artificial Sequence: Synthetic primer
aacaacaataccc

SEQ ID NO: 5841 - DNA, 13 bp, Artificial Sequence
  Description of Artificial Sequence: Synthetic primer
gcccaggacaaga

SEQ ID NO: 5842 - DNA, 13 bp, Artificial Sequence
  Description of Artificial Sequence: Synthetic primer
tcgcaattggaga

SEQ ID NO: 5843 - DNA, 13 bp, Artificial Sequence
  Description of Artificial Sequence: Synthetic primer
agctttaccatta

SEQ ID NO: 5844 - DNA, 13 bp, Artificial Sequence
  Description of Artificial Sequence: Synthetic primer
aggaatggctgta

SEQ ID NO: 5845 - DNA, 13 bp, Artificial Sequence
  Description of Artificial Sequence: Synthetic primer
gccctgggtcatg

SEQ ID NO: 5846 - DNA, 13 bp, Artificial Sequence
  Description of Artificial Sequence: Synthetic primer
gaaggtctctcgc

SEQ ID NO: 5847 - DNA, 13 bp, Artificial Sequence
  Description of Artificial Sequence: Synthetic primer
gaccttgttcggg

SEQ ID NO: 5848 - DNA, 13 bp, Artificial Sequence
  Description of Artificial Sequence: Synthetic primer
aggtctttatcgt

SEQ ID NO: 5849 - DNA, 13 bp, Artificial Sequence
  Description of Artificial Sequence: Synthetic primer
cttaccgttatca

SEQ ID NO: 5850 - DNA, 13 bp, Artificial Sequence
  Description of Artificial Sequence: Synthetic primer
cattttggtaaag

SEQ ID NO: 5851 - DNA, 13 bp, Artificial Sequence
  Description of Artificial Sequence: Synthetic primer
aggtatcggggta

SEQ ID NO: 5852 - DNA, 13 bp, Artificial Sequence
  Description of Artificial Sequence: Synthetic primer
tgattgtttcatt

SEQ ID NO: 5853 - DNA, 13 bp, Artificial Sequence
  Description of Artificial Sequence: Synthetic primer
tggtcaccagcgt

SEQ ID NO: 5854 - DNA, 13 bp, Artificial Sequence
  Description of Artificial Sequence: Synthetic primer
gcatctccgcagg

SEQ ID NO: 5855 - DNA, 13 bp, Artificial Sequence
  Description of Artificial Sequence: Synthetic primer
acacccagtaggc

SEQ ID NO: 5856 - DNA, 13 bp, Artificial Sequence
  Description of Artificial Sequence: Synthetic primer
cttaggcattctg

SEQ ID NO: 5857 - DNA, 13 bp, Artificial Sequence
  Description of Artificial Sequence: Synthetic primer
ggcacattattat

SEQ ID NO: 5858 - DNA, 13 bp, Artificial Sequence
  Description of Artificial Sequence: Synthetic primer
ttttgatatgagt

SEQ ID NO: 5859 - DNA, 13 bp, Artificial Sequence
  Description of Artificial Sequence: Synthetic primer
ctgataactgtcc

SEQ ID NO: 5860 - DNA, 13 bp, Artificial Sequence
  Description of Artificial Sequence: Synthetic primer
ggtctccattggc

SEQ ID NO: 5861 - DNA, 13 bp, Artificial Sequence
  Description of Artificial Sequence: Synthetic primer
ccaacgcgccaca

SEQ ID NO: 5862 - DNA, 13 bp, Artificial Sequence
  Description of Artificial Sequence: Synthetic primer
ttgtactttccct

SEQ ID NO: 5863 - DNA, 13 bp, Artificial Sequence
  Description of Artificial Sequence: Synthetic primer
cttctttagtatc

SEQ ID NO: 5864 - DNA, 13 bp, Artificial Sequence
  Description of Artificial Sequence: Synthetic primer
atccaaataatcc

SEQ ID NO: 5865 - DNA, 13 bp, Artificial Sequence
  Description of Artificial Sequence: Synthetic primer
gggaacagccgta

SEQ ID NO: 5866 - DNA, 13 bp, Artificial Sequence
  Description of Artificial Sequence: Synthetic primer
tcggtcagcaaaa

SEQ ID NO: 5867 - DNA, 13 bp, Artificial Sequence
  Description of Artificial Sequence: Synthetic primer
tgcagctcggcga

SEQ ID NO: 5868 - DNA, 13 bp, Artificial Sequence
  Description of Artificial Sequence: Synthetic primer
cgcaaatcaaaga

SEQ ID NO: 5869 - DNA, 13 bp, Artificial Sequence
  Description of Artificial Sequence: Synthetic primer
tctggttgatgaa

SEQ ID NO: 5870 - DNA, 13 bp, Artificial Sequence
  Description of Artificial Sequence: Synthetic primer
ggtgtggactctg

SEQ ID NO: 5871 - DNA, 13 bp, Artificial Sequence
  Description of Artificial Sequence: Synthetic primer
ccgcaggctgttc

SEQ ID NO: 5872 - DNA, 13 bp, Artificial Sequence
  Description of Artificial Sequence: Synthetic primer
aacccgtcctgat

SEQ ID NO: 5873 - DNA, 13 bp, Artificial Sequence
  Description of Artificial Sequence: Synthetic primer
cccaatcaggctt

SEQ ID NO: 5874 - DNA, 13 bp, Artificial Sequence
  Description of Artificial Sequence: Synthetic primer
agaaaccgcttca

SEQ ID NO: 5875 - DNA, 13 bp, Artificial Sequence
  Description of Artificial Sequence: Synthetic primer
acgctactgatgg

SEQ ID NO: 5876 - DNA, 13 bp, Artificial Sequence
  Description of Artificial Sequence: Synthetic primer
atgtcattgcgct

SEQ ID NO: 5877 - DNA, 13 bp, Artificial Sequence
  Description of Artificial Sequence: Synthetic primer
tcgacgaactccc

SEQ ID NO: 5878 - DNA, 13 bp, Artificial Sequence
  Description of Artificial Sequence: Synthetic primer
ccagcaactggtc

SEQ ID NO: 5879 - DNA, 13 bp, Artificial Sequence
  Description of Artificial Sequence: Synthetic primer
gttgagaatctgc

SEQ ID NO: 5880 - DNA, 13 bp, Artificial Sequence
  Description of Artificial Sequence: Synthetic primer
cgtttacaaaacg

SEQ ID NO: 5881 - DNA, 13 bp, Artificial Sequence
  Description of Artificial Sequence: Synthetic primer
tcatgtgatttcg

SEQ ID NO: 5882 - DNA, 13 bp, Artificial Sequence
  Description of Artificial Sequence: Synthetic primer
ctgtcggtggcga

SEQ ID NO: 5883 - DNA, 13 bp, Artificial Sequence
  Description of Artificial Sequence: Synthetic primer
aacaccatgccaa

SEQ ID NO: 5884 - DNA, 13 bp, Artificial Sequence
  Description of Artificial Sequence: Synthetic primer
ctatcagcttatc

SEQ ID NO: 5885 - DNA, 13 bp, Artificial Sequence
  Description of Artificial Sequence: Synthetic primer
ctttgcggaaatg

SEQ ID NO: 5886 - DNA, 13 bp, Artificial Sequence
  Description of Artificial Sequence: Synthetic primer
ttcgccctgacca

SEQ ID NO: 5887 - DNA, 13 bp, Artificial Sequence
  Description of Artificial Sequence: Synthetic primer
cttgtttcatttt

SEQ ID NO: 5888 - DNA, 13 bp, Artificial Sequence
  Description of Artificial Sequence: Synthetic primer
taaaggcaatcac

SEQ ID NO: 5889 - DNA, 13 bp, Artificial Sequence
  Description of Artificial Sequence: Synthetic primer
cgtgcggatgttt

SEQ ID NO: 5890 - DNA, 13 bp, Artificial Sequence
  Description of Artificial Sequence: Synthetic primer
cagttgaataatg

SEQ ID NO: 5891 - DNA, 13 bp, Artificial Sequence
  Description of Artificial Sequence: Synthetic primer
cttttgatagaga

SEQ ID NO: 5892 - DNA, 13 bp, Artificial Sequence
  Description of Artificial Sequence: Synthetic primer
tattagacgagca

SEQ ID NO: 5893 - DNA, 13 bp, Artificial Sequence
  Description of Artificial Sequence: Synthetic primer
gaacacgaccgtg

SEQ ID NO: 5894 - DNA, 13 bp, Artificial Sequence
  Description of Artificial Sequence: Synthetic primer
cagtcgccctaaa

SEQ ID NO: 5895 - DNA, 13 bp, Artificial Sequence
  Description of Artificial Sequence: Synthetic primer
gattttcgtaatg

SEQ ID NO: 5896 - DNA, 13 bp, Artificial Sequence
  Description of Artificial Sequence: Synthetic primer
tcgagttctgctt

SEQ ID NO: 5897 - DNA, 13 bp, Artificial Sequence
  Description of Artificial Sequence: Synthetic primer
tgctcctgttgcc

SEQ ID NO: 5898 - DNA, 13 bp, Artificial Sequence
  Description of Artificial Sequence: Synthetic primer
actaagaacagcg

SEQ ID NO: 5899 - DNA, 13 bp, Artificial Sequence
  Description of Artificial Sequence: Synthetic primer
aaaagcccgttcc

SEQ ID NO: 5900 - DNA, 13 bp, Artificial Sequence
  Description of Artificial Sequence: Synthetic primer
aatgtatagacaa

SEQ ID NO: 5901 - DNA, 13 bp, Artificial Sequence
  Description of Artificial Sequence: Synthetic primer
atgccgacgccga

SEQ ID NO: 5902 - DNA, 13 bp, Artificial Sequence
  Description of Artificial Sequence: Synthetic primer
ttcttcataatca

SEQ ID NO: 5903 - DNA, 13 bp, Artificial Sequence
  Description of Artificial Sequence: Synthetic primer
aacgcgtacgttt

SEQ ID NO: 5904 - DNA, 13 bp, Artificial Sequence
  Description of Artificial Sequence: Synthetic primer
gtggtgccctgct

SEQ ID NO: 5905 - DNA, 13 bp, Artificial Sequence
  Description of Artificial Sequence: Synthetic primer
gcctgatcgccga

SEQ ID NO: 5906 - DNA, 13 bp, Artificial Sequence
  Description of Artificial Sequence: Synthetic primer
gccagtttgatac

SEQ ID NO: 5907 - DNA, 13 bp, Artificial Sequence
  Description of Artificial Sequence: Synthetic primer
atgattcctccaa

SEQ ID NO: 5908 - DNA, 13 bp, Artificial Sequence
  Description of Artificial Sequence: Synthetic primer
ctttcatacctaa

SEQ ID NO: 5909 - DNA, 13 bp, Artificial Sequence
  Description of Artificial Sequence: Synthetic primer
tttattaccgttc

SEQ ID NO: 5910 - DNA, 13 bp, Artificial Sequence
  Description of Artificial Sequence: Synthetic primer
caatctcgattac

SEQ ID NO: 5911 - DNA, 13 bp, Artificial Sequence
  Description of Artificial Sequence: Synthetic primer
ggagcagatggtt

SEQ ID NO: 5912 - DNA, 13 bp, Artificial Sequence
  Description of Artificial Sequence: Synthetic primer
aatattctcggct

SEQ ID NO: 5913 - DNA, 13 bp, Artificial Sequence
  Description of Artificial Sequence: Synthetic primer
gtttgctccggta

SEQ ID NO: 5914 - DNA, 13 bp, Artificial Sequence
  Description of Artificial Sequence: Synthetic primer
atatgtcgaaatg

SEQ ID NO: 5915 - DNA, 13 bp, Artificial Sequence
  Description of Artificial Sequence: Synthetic primer
gagcttacattta

SEQ ID NO: 5916 - DNA, 13 bp, Artificial Sequence
  Description of Artificial Sequence: Synthetic primer
tggtgggtatcgc

SEQ ID NO: 5917 - DNA, 13 bp, Artificial Sequence
  Description of Artificial Sequence: Synthetic primer
gtgatcgcgttcg

SEQ ID NO: 5918 - DNA, 13 bp, Artificial Sequence
  Description of Artificial Sequence: Synthetic primer
ggggtgtgatgat

SEQ ID NO: 5919 - DNA, 13 bp, Artificial Sequence
  Description of Artificial Sequence: Synthetic primer
cctgatgtatcga

SEQ ID NO: 5920 - DNA, 13 bp, Artificial Sequence
  Description of Artificial Sequence: Synthetic primer
caagggcagtgcg

SEQ ID NO: 5921 - DNA, 13 bp, Artificial Sequence
  Description of Artificial Sequence: Synthetic primer
tatcgggtggatt

SEQ ID NO: 5922 - DNA, 13 bp, Artificial Sequence
  Description of Artificial Sequence: Synthetic primer
ttgatccccagac

SEQ ID NO: 5923 - DNA, 13 bp, Artificial Sequence
  Description of Artificial Sequence: Synthetic primer
tcggccaggtgca

SEQ ID NO: 5924 - DNA, 13 bp, Artificial Sequence
  Description of Artificial Sequence: Synthetic primer
gtgaagccgtctg

SEQ ID NO: 5925 - DNA, 13 bp, Artificial Sequence
  Description of Artificial Sequence: Synthetic primer
aggtgacgccgaa

SEQ ID NO: 5926 - DNA, 13 bp, Artificial Sequence
  Description of Artificial Sequence: Synthetic primer
atttcaaccgtga

SEQ ID NO: 5927 - DNA, 13 bp, Artificial Sequence
  Description of Artificial Sequence: Synthetic primer
agcgtcaaagggg

SEQ ID NO: 5928 - DNA, 13 bp, Artificial Sequence
  Description of Artificial Sequence: Synthetic primer
aatgccaatgcgc

SEQ ID NO: 5929 - DNA, 13 bp, Artificial Sequence
  Description of Artificial Sequence: Synthetic primer
cacgcaagacctc

SEQ ID NO: 5930 - DNA, 13 bp, Artificial Sequence
  Description of Artificial Sequence: Synthetic primer
catagacggagtg

SEQ ID NO: 5931 - DNA, 13 bp, Artificial Sequence
  Description of Artificial Sequence: Synthetic primer
cggtcacttcatt

SEQ ID NO: 5932 - DNA, 13 bp, Artificial Sequence
  Description of Artificial Sequence: Synthetic primer
tctactggaatta

SEQ ID NO: 5933 - DNA, 13 bp, Artificial Sequence
  Description of Artificial Sequence: Synthetic primer
acgaggaaggcca

SEQ ID NO: 5934 - DNA, 13 bp, Artificial Sequence
  Description of Artificial Sequence: Synthetic primer
aggatcttttcgg

SEQ ID NO: 5935 - DNA, 13 bp, Artificial Sequence
  Description of Artificial Sequence: Synthetic primer
acgcgcatcgagt

SEQ ID NO: 5936 - DNA, 13 bp, Artificial Sequence
  Description of Artificial Sequence: Synthetic primer
aatcgctgggctt

SEQ ID NO: 5937 - DNA, 13 bp, Artificial Sequence
  Description of Artificial Sequence: Synthetic primer
aggacgcctacat

SEQ ID NO: 5938 - DNA, 13 bp, Artificial Sequence
  Description of Artificial Sequence: Synthetic primer
cggtggttcgctg

SEQ ID NO: 5939 - DNA, 13 bp, Artificial Sequence
  Description of Artificial Sequence: Synthetic primer
cgtaaaaccggct

SEQ ID NO: 5940 - DNA, 13 bp, Artificial Sequence
  Description of Artificial Sequence: Synthetic primer
cagcgtgagcgag

SEQ ID NO: 5941 - DNA, 13 bp, Artificial Sequence
  Description of Artificial Sequence: Synthetic primer
ggaaacgaaacct

SEQ ID NO: 5942 - DNA, 13 bp, Artificial Sequence
  Description of Artificial Sequence: Synthetic primer
ccgtgatcttcca

SEQ ID NO: 5943 - DNA, 13 bp, Artificial Sequence
  Description of Artificial Sequence: Synthetic primer
ctgtctgttacac

SEQ ID NO: 5944 - DNA, 13 bp, Artificial Sequence
  Description of Artificial Sequence: Synthetic primer
acagcccagagct

SEQ ID NO: 5945 - DNA, 13 bp, Artificial Sequence
  Description of Artificial Sequence: Synthetic primer
acatatcccaagg

SEQ ID NO: 5946 - DNA, 13 bp, Artificial Sequence
  Description of Artificial Sequence: Synthetic primer
cggattcacttca

SEQ ID NO: 5947 - DNA, 13 bp, Artificial Sequence
  Description of Artificial Sequence: Synthetic primer
atccgggcgcaga

SEQ ID NO: 5948 - DNA, 13 bp, Artificial Sequence
  Description of Artificial Sequence: Synthetic primer
agccgccttgacc

SEQ ID NO: 5949 - DNA, 13 bp, Artificial Sequence
  Description of Artificial Sequence: Synthetic primer
ctgcaccaacaac

SEQ ID NO: 5950 - DNA, 13 bp, Artificial Sequence
  Description of Artificial Sequence: Synthetic primer
tttccgcaggtag

SEQ ID NO: 5951 - DNA, 13 bp, Artificial Sequence
  Description of Artificial Sequence: Synthetic primer
ctgatcgtcctgc

SEQ ID NO: 5952 - DNA, 13 bp, Artificial Sequence
  Description of Artificial Sequence: Synthetic primer
ttcctaatgccaa

SEQ ID NO: 5953 - DNA, 13 bp, Artificial Sequence
  Description of Artificial Sequence: Synthetic primer
ccacaaagcgata

SEQ ID NO: 5954 - DNA, 13 bp, Artificial Sequence
  Description of Artificial Sequence: Synthetic primer
agggcgagatcaa

SEQ ID NO: 5955 - DNA, 13 bp, Artificial Sequence
  Description of Artificial Sequence: Synthetic primer
tgtaataatgtcg

SEQ ID NO: 5956 - DNA, 13 bp, Artificial Sequence
  Description of Artificial Sequence: Synthetic primer
gtcaacaatggta

SEQ ID NO: 5957 - DNA, 13 bp, Artificial Sequence
  Description of Artificial Sequence: Synthetic primer
cttcacgaagtag

SEQ ID NO: 5958 - DNA, 13 bp, Artificial Sequence
  Description of Artificial Sequence: Synthetic primer
aaacttcggcttc

SEQ ID NO: 5959 - DNA, 13 bp, Artificial Sequence
  Description of Artificial Sequence: Synthetic primer
ggctgccagtttt

SEQ ID NO: 5960 - DNA, 13 bp, Artificial Sequence
  Description of Artificial Sequence: Synthetic primer
tatgttatcacac

SEQ ID NO: 5961 - DNA, 13 bp, Artificial Sequence
  Description of Artificial Sequence: Synthetic primer
tggaggacgatgt

SEQ ID NO: 5962 - DNA, 13 bp, Artificial Sequence
  Description of Artificial Sequence: Synthetic primer
tcgaggacatgct

SEQ ID NO: 5963 - DNA, 13 bp, Artificial Sequence
  Description of Artificial Sequence: Synthetic primer
aaaagttcaattg

SEQ ID NO: 5964 - DNA, 13 bp, Artificial Sequence
  Description of Artificial Sequence: Synthetic primer
ggttgtctgcttt

SEQ ID NO: 5965 - DNA, 13 bp, Artificial Sequence
  Description of Artificial Sequence: Synthetic primer
caatttgccagca

SEQ ID NO: 5966 - DNA, 13 bp, Artificial Sequence
  Description of Artificial Sequence: Synthetic primer
cctatgtcctgac

SEQ ID NO: 5967 - DNA, 13 bp, Artificial Sequence
  Description of Artificial Sequence: Synthetic primer
ttcccttagatca

SEQ ID NO: 5968 - DNA, 13 bp, Artificial Sequence
  Description of Artificial Sequence: Synthetic primer
ttttcccggagtt

SEQ ID NO: 5969 - DNA, 13 bp, Artificial Sequence
  Description of Artificial Sequence: Synthetic primer
cgcgcacgaacat

SEQ ID NO: 5970 - DNA, 13 bp, Artificial Sequence
  Description of Artificial Sequence: Synthetic primer
gggcaaacggctg

SEQ ID NO: 5971 - DNA, 13 bp, Artificial Sequence
  Description of Artificial Sequence: Synthetic primer
aagcatcgagtct

SEQ ID NO: 5972 - DNA, 13 bp, Artificial Sequence
  Description of Artificial Sequence: Synthetic primer
tacttattgtgga

SEQ ID NO: 5973 - DNA, 13 bp, Artificial Sequence
  Description of Artificial Sequence: Synthetic primer
tatagccgacccc

SEQ ID NO: 5974 - DNA, 13 bp, Artificial Sequence
  Description of Artificial Sequence: Synthetic primer
gatcgaatagccg

SEQ ID NO: 5975 - DNA, 13 bp, Artificial Sequence
  Description of Artificial Sequence: Synthetic primer
gtaactattgaaa

SEQ ID NO: 5976 - DNA, 13 bp, Artificial Sequence
  Description of Artificial Sequence: Synthetic primer
cgacgcgaatggt

SEQ ID NO: 5977 - DNA, 13 bp, Artificial Sequence
  Description of Artificial Sequence: Synthetic primer
agcgagaagccga

SEQ ID NO: 5978 - DNA, 13 bp, Artificial Sequence
  Description of Artificial Sequence: Synthetic primer
tgtcgaaggccag

SEQ ID NO: 5979 - DNA, 13 bp, Artificial Sequence
  Description of Artificial Sequence: Synthetic primer
tgtcgttctgtcc

SEQ ID NO: 5980 - DNA, 13 bp, Artificial Sequence
  Description of Artificial Sequence: Synthetic primer
gttcgggataagc

SEQ ID NO: 5981 - DNA, 13 bp, Artificial Sequence
  Description of Artificial Sequence: Synthetic primer
tcattgggcaaac

SEQ ID NO: 5982 - DNA, 13 bp, Artificial Sequence
  Description of Artificial Sequence: Synthetic primer
caactgttgaacc

SEQ ID NO: 5983 - DNA, 13 bp, Artificial Sequence
  Description of Artificial Sequence: Synthetic primer
tcaattcaaattg

SEQ ID NO: 5984 - DNA, 13 bp, Artificial Sequence
  Description of Artificial Sequence: Synthetic primer
actaagttggcat

SEQ ID NO: 5985 - DNA, 13 bp, Artificial Sequence
  Description of Artificial Sequence: Synthetic primer
ggttacgcgcttc

SEQ ID NO: 5986 - DNA, 13 bp, Artificial Sequence
  Description of Artificial Sequence: Synthetic primer
cacgcgtttcagt

SEQ ID NO: 5987 - DNA, 13 bp, Artificial Sequence
  Description of Artificial Sequence: Synthetic primer
gtctgccaagctc

SEQ ID NO: 5988 - DNA, 13 bp, Artificial Sequence
  Description of Artificial Sequence: Synthetic primer
aatgtatgtgcga

SEQ ID NO: 5989 - DNA, 13 bp, Artificial Sequence
  Description of Artificial Sequence: Synthetic primer
ttatcatcgataa

SEQ ID NO: 5990 - DNA, 13 bp, Artificial Sequence
  Description of Artificial Sequence: Synthetic primer
ctcagcctgtttg

SEQ ID NO: 5991 - DNA, 13 bp, Artificial Sequence
  Description of Artificial Sequence: Synthetic primer
cagcggcattgca

SEQ ID NO: 5992 - DNA, 13 bp, Artificial Sequence
  Description of Artificial Sequence: Synthetic primer
aggatgtccgggc

SEQ ID NO: 5993 - DNA, 13 bp, Artificial Sequence
  Description of Artificial Sequence: Synthetic primer
gtatggtgatggg

SEQ ID NO: 5994 - DNA, 13 bp, Artificial Sequence
  Description of Artificial Sequence: Synthetic primer
ggagttcagctcc

SEQ ID NO: 5995 - DNA, 13 bp, Artificial Sequence
  Description of Artificial Sequence: Synthetic primer
tcagtacggtatg

SEQ ID NO: 5996 - DNA, 13 bp, Artificial Sequence
  Description of Artificial Sequence: Synthetic primer
gttgccagtttaa

SEQ ID NO: 5997 - DNA, 13 bp, Artificial Sequence
  Description of Artificial Sequence: Synthetic primer
ccagctttcgtac

SEQ ID NO: 5998 - DNA, 13 bp, Artificial Sequence
  Description of Artificial Sequence: Synthetic primer
ctcgatccactcg

SEQ ID NO: 5999 - DNA, 13 bp, Artificial Sequence
  Description of Artificial Sequence: Synthetic primer
ccctcctggatat

SEQ ID NO: 6000 - DNA, 13 bp, Artificial Sequence
  Description of Artificial Sequence: Synthetic primer
tccgtcgcaaggc

SEQ ID NO: 6001 - DNA, 13 bp, Artificial Sequence
  Description of Artificial Sequence: Synthetic primer
tactttcaccagc

SEQ ID NO: 6002 - DNA, 13 bp, Artificial Sequence
  Description of Artificial Sequence: Synthetic primer
cgtacgccgctac

SEQ ID NO: 6003 - DNA, 13 bp, Artificial Sequence
  Description of Artificial Sequence: Synthetic primer
ggtaacgaaacca

SEQ ID NO: 6004 - DNA, 13 bp, Artificial Sequence
  Description of Artificial Sequence: Synthetic primer
ccattcatttaca

SEQ ID NO: 6005 - DNA, 13 bp, Artificial Sequence
  Description of Artificial Sequence: Synthetic primer
ctgaaccttcaaa

SEQ ID NO: 6006 - DNA, 13 bp, Artificial Sequence
  Description of Artificial Sequence: Synthetic primer
tcttggctaaata

SEQ ID NO: 6007 - DNA, 13 bp, Artificial Sequence
  Description of Artificial Sequence: Synthetic primer
atgactgccaata

SEQ ID NO: 6008 - DNA, 13 bp, Artificial Sequence
  Description of Artificial Sequence: Synthetic primer
tcatcgcccgctt

SEQ ID NO: 6009 - DNA, 13 bp, Artificial Sequence
  Description of Artificial Sequence: Synthetic primer
ttcggggacgctg

SEQ ID NO: 6010 - DNA, 13 bp, Artificial Sequence
  Description of Artificial Sequence: Synthetic primer
tgccgcaggtcga

SEQ ID NO: 6011 - DNA, 13 bp, Artificial Sequence
  Description of Artificial Sequence: Synthetic primer
catggtcgtaatt

SEQ ID NO: 6012 - DNA, 13 bp, Artificial Sequence
  Description of Artificial Sequence: Synthetic primer
tgctgttcctgcg

SEQ ID NO: 6013 - DNA, 13 bp, Artificial Sequence
  Description of Artificial Sequence: Synthetic primer
cccgccgtaatgt

SEQ ID NO: 6014 - DNA, 13 bp, Artificial Sequence
  Description of Artificial Sequence: Synthetic primer
tcatacatttctt

SEQ ID NO: 6015 - DNA, 13 bp, Artificial Sequence
  Description of Artificial Sequence: Synthetic primer
atgaggggaaaac

SEQ ID NO: 6016 - DNA, 13 bp, Artificial Sequence
  Description of Artificial Sequence: Synthetic primer
ggtgcgatccaca

SEQ ID NO: 6017 - DNA, 13 bp, Artificial Sequence
  Description of Artificial Sequence: Synthetic primer
cgggctgatactg

SEQ ID NO: 6018 - DNA, 13 bp, Artificial Sequence
  Description of Artificial Sequence: Synthetic primer
acgcacggcagga

SEQ ID NO: 6019 - DNA, 13 bp, Artificial Sequence
  Description of Artificial Sequence: Synthetic primer
gttgaagatggct

SEQ ID NO: 6020 - DNA, 13 bp, Artificial Sequence
  Description of Artificial Sequence: Synthetic primer
ccggccgatcttt

SEQ ID NO: 6021 - DNA, 13 bp, Artificial Sequence
  Description of Artificial Sequence: Synthetic primer
accattttcgata

SEQ ID NO: 6022 - DNA, 13 bp, Artificial Sequence
  Description of Artificial Sequence: Synthetic primer
gagcaggatgagg

SEQ ID NO: 6023 - DNA, 13 bp, Artificial Sequence
  Description of Artificial Sequence: Synthetic primer
aagcccttcaatg

SEQ ID NO: 6024 - DNA, 13 bp, Artificial Sequence
  Description of Artificial Sequence: Synthetic primer
tattattgctgtc

SEQ ID NO: 6025 - DNA, 13 bp, Artificial Sequence
  Description of Artificial Sequence: Synthetic primer
ctgcggatcgcga

SEQ ID NO: 6026 - DNA, 13 bp, Artificial Sequence
  Description of Artificial Sequence: Synthetic primer
gaattgcccagct

SEQ ID NO: 6027 - DNA, 13 bp, Artificial Sequence
  Description of Artificial Sequence: Synthetic primer
tcgttcgaggagc

SEQ ID NO: 6028 - DNA, 13 bp, Artificial Sequence
  Description of Artificial Sequence: Synthetic primer
gcattccttatgt

SEQ ID NO: 6029 - DNA, 13 bp, Artificial Sequence
  Description of Artificial Sequence: Synthetic primer
ttgaaataacagc

SEQ ID NO: 6030 - DNA, 13 bp, Artificial Sequence
  Description of Artificial Sequence: Synthetic primer
actaacggcatta

SEQ ID NO: 6031 - DNA, 13 bp, Artificial Sequence
  Description of Artificial Sequence: Synthetic primer
ttgatgatcaggg

SEQ ID NO: 6032 - DNA, 13 bp, Artificial Sequence
  Description of Artificial Sequence: Synthetic primer
caaagttgaagcg

SEQ ID NO: 6033 - DNA, 13 bp, Artificial Sequence
  Description of Artificial Sequence: Synthetic primer
catgccggacggt

SEQ ID NO: 6034 - DNA, 13 bp, Artificial Sequence
  Description of Artificial Sequence: Synthetic primer
caccagcttctgc

SEQ ID NO: 6035 - DNA, 13 bp, Artificial Sequence
  Description of Artificial Sequence: Synthetic primer
agggcaccagtat

SEQ ID NO: 6036 - DNA, 13 bp, Artificial Sequence
  Description of Artificial Sequence: Synthetic primer
tccttctgcgcga

SEQ ID NO: 6037 - DNA, 13 bp, Artificial Sequence
  Description of Artificial Sequence: Synthetic primer
ctcctttcaaagt

SEQ ID NO: 6038 - DNA, 13 bp, Artificial Sequence
  Description of Artificial Sequence: Synthetic primer
ggtaagccgcttc

SEQ ID NO: 6039 - DNA, 13 bp, Artificial Sequence
  Description of Artificial Sequence: Synthetic primer
gcggataacgggg

SEQ ID NO: 6040 - DNA, 13 bp, Artificial Sequence
  Description of Artificial Sequence: Synthetic primer
tattagccggtat

SEQ ID NO: 6041 - DNA, 13 bp, Artificial Sequence
  Description of Artificial Sequence: Synthetic primer
tccatcgcctggg

SEQ ID NO: 6042 - DNA, 13 bp, Artificial Sequence
  Description of Artificial Sequence: Synthetic primer
gtctgatatcaac

SEQ ID NO: 6043 - DNA, 13 bp, Artificial Sequence
  Description of Artificial Sequence: Synthetic primer
atcatcggtatca

SEQ ID NO: 6044 - DNA, 13 bp, Artificial Sequence
  Description of Artificial Sequence: Synthetic primer
aaagatcccatca

SEQ ID NO: 6045 - DNA, 13 bp, Artificial Sequence
  Description of Artificial Sequence: Synthetic primer
gttttagaaccgc

SEQ ID NO: 6046 - DNA, 13 bp, Artificial Sequence
  Description of Artificial Sequence: Synthetic primer
ggatggctgtgtt

SEQ ID NO: 6047 - DNA, 13 bp, Artificial Sequence
  Description of Artificial Sequence: Synthetic primer
taacaattcattg

SEQ ID NO: 6048 - DNA, 13 bp, Artificial Sequence
  Description of Artificial Sequence: Synthetic primer
ggtaacggcgcca

SEQ ID NO: 6049 - DNA, 13 bp, Artificial Sequence
  Description of Artificial Sequence: Synthetic primer
aatcggtttcagc

SEQ ID NO: 6050 - DNA, 13 bp, Artificial Sequence
  Description of Artificial Sequence: Synthetic primer
atcaaggatgagc

SEQ ID NO: 6051 - DNA, 13 bp, Artificial Sequence
  Description of Artificial Sequence: Synthetic primer
caccatctggccg

SEQ ID NO: 6052 - DNA, 13 bp, Artificial Sequence
  Description of Artificial Sequence: Synthetic primer
agcggctaaaatt

SEQ ID NO: 6053 - DNA, 13 bp, Artificial Sequence
  Description of Artificial Sequence: Synthetic primer
cgccagagcgaca

SEQ ID NO: 6054 - DNA, 13 bp, Artificial Sequence
  Description of Artificial Sequence: Synthetic primer
agaacttccgcgc

SEQ ID NO: 6055 - DNA, 13 bp, Artificial Sequence
  Description of Artificial Sequence: Synthetic primer
cgtcgacgatcac

SEQ ID NO: 6056 - DNA, 13 bp, Artificial Sequence
  Description of Artificial Sequence: Synthetic primer
gaaaacgcatccg

SEQ ID NO: 6057 - DNA, 13 bp, Artificial Sequence
  Description of Artificial Sequence: Synthetic primer
caacatcttcatt

SEQ ID NO: 6058 - DNA, 13 bp, Artificial Sequence
  Description of Artificial Sequence: Synthetic primer
accgggtcgatcc

SEQ ID NO: 6059 - DNA, 13 bp, Artificial Sequence
  Description of Artificial Sequence: Synthetic primer
tgtcggcggtatt

SEQ ID NO: 6060 - DNA, 13 bp, Artificial Sequence
  Description of Artificial Sequence: Synthetic primer
gttatcactcatg

SEQ ID NO: 6061 - DNA, 13 bp, Artificial Sequence
  Description of Artificial Sequence: Synthetic primer
taagtggaacgaa

SEQ ID NO: 6062 - DNA, 13 bp, Artificial Sequence
  Description of Artificial Sequence: Synthetic primer
cgatccccaacag

SEQ ID NO: 6063 - DNA, 13 bp, Artificial Sequence
  Description of Artificial Sequence: Synthetic primer
aagacccaataca

SEQ ID NO: 6064 - DNA, 13 bp, Artificial Sequence
  Description of Artificial Sequence: Synthetic primer
ataacagcactta

SEQ ID NO: 6065 - DNA, 13 bp, Artificial Sequence
  Description of Artificial Sequence: Synthetic primer
ctgctgaaagtga

SEQ ID NO: 6066 - DNA, 13 bp, Artificial Sequence
  Description of Artificial Sequence: Synthetic primer
gctgagaaaatat

SEQ ID NO: 6067 - DNA, 13 bp, Artificial Sequence
  Description of Artificial Sequence: Synthetic primer
tgctgtcgtcata

SEQ ID NO: 6068 - DNA, 13 bp, Artificial Sequence
  Description of Artificial Sequence: Synthetic primer
gggccggtgatca

SEQ ID NO: 6069 - DNA, 13 bp, Artificial Sequence
  Description of Artificial Sequence: Synthetic primer
gtctcctcgacgg

SEQ ID NO: 6070 - DNA, 13 bp, Artificial Sequence
  Description of Artificial Sequence: Synthetic primer
aaacgctgtcggt

SEQ ID NO: 6071 - DNA, 13 bp, Artificial Sequence
  Description of Artificial Sequence: Synthetic primer
tggaacttattaa

SEQ ID NO: 6072 - DNA, 13 bp, Artificial Sequence
  Description of Artificial Sequence: Synthetic primer
tgtcctaccagga

SEQ ID NO: 6073 - DNA, 13 bp, Artificial Sequence
  Description of Artificial Sequence: Synthetic primer
ctggttgcgcacg

SEQ ID NO: 6074 - DNA, 13 bp, Artificial Sequence
  Description of Artificial Sequence: Synthetic primer
ttttgttattcca

SEQ ID NO: 6075 - DNA, 13 bp, Artificial Sequence
  Description of Artificial Sequence: Synthetic primer
gcctgctcaaagc

SEQ ID NO: 6076 - DNA, 13 bp, Artificial Sequence
  Description of Artificial Sequence: Synthetic primer
acgcaggaggata

SEQ ID NO: 6077 - DNA, 13 bp, Artificial Sequence
  Description of Artificial Sequence: Synthetic primer
gacggaacggatt

SEQ ID NO: 6078 - DNA, 13 bp, Artificial Sequence
  Description of Artificial Sequence: Synthetic primer
tcagcggccgcat

SEQ ID NO: 6079 - DNA, 13 bp, Artificial Sequence
  Description of Artificial Sequence: Synthetic primer
accaccacaatcg

SEQ ID NO: 6080 - DNA, 13 bp, Artificial Sequence
  Description of Artificial Sequence: Synthetic primer
gataacgcggtag

SEQ ID NO: 6081 - DNA, 13 bp, Artificial Sequence
  Description of Artificial Sequence: Synthetic primer
gtcagcaagacct

SEQ ID NO: 6082 - DNA, 13 bp, Artificial Sequence
  Description of Artificial Sequence: Synthetic primer
tgaaagtgtcgat

SEQ ID NO: 6083 - DNA, 13 bp, Artificial Sequence
  Description of Artificial Sequence: Synthetic primer
aggagaactcaga

SEQ ID NO: 6084 - DNA, 13 bp, Artificial Sequence
  Description of Artificial Sequence: Synthetic primer
acgaccacaaaga

SEQ ID NO: 6085 - DNA, 13 bp, Artificial Sequence
  Description of Artificial Sequence: Synthetic primer
gcaccagacgcac

SEQ ID NO: 6086 - DNA, 13 bp, Artificial Sequence
  Description of Artificial Sequence: Synthetic primer
caccggcacatgg

SEQ ID NO: 6087 - DNA, 13 bp, Artificial Sequence
  Description of Artificial Sequence: Synthetic primer
aaaatcctgttga

SEQ ID NO: 6088 - DNA, 13 bp, Artificial Sequence
  Description of Artificial Sequence: Synthetic primer
cgagctgatcgag

SEQ ID NO: 6089 - DNA, 13 bp, Artificial Sequence
  Description of Artificial Sequence: Synthetic primer
tcgaggttgaccc

SEQ ID NO: 6090 - DNA, 13 bp, Artificial Sequence
  Description of Artificial Sequence: Synthetic primer
cggcagcacaaac

SEQ ID NO: 6091 - DNA, 13 bp, Artificial Sequence
  Description of Artificial Sequence: Synthetic primer
agtttatggaaaa

SEQ ID NO: 6092 - DNA, 13 bp, Artificial Sequence
  Description of Artificial Sequence: Synthetic primer
tgtaccaaatgcg

SEQ ID NO: 6093 - DNA, 13 bp, Artificial Sequence
  Description of Artificial Sequence: Synthetic primer
tgcgaattcaccg

SEQ ID NO: 6094 - DNA, 13 bp, Artificial Sequence
  Description of Artificial Sequence: Synthetic primer
cgaacatccccgg

SEQ ID NO: 6095 - DNA, 13 bp, Artificial Sequence
  Description of Artificial Sequence: Synthetic primer
gatccgatctacg

SEQ ID NO: 6096 - DNA, 13 bp, Artificial Sequence
  Description of Artificial Sequence: Synthetic primer
acggtatcgtact

SEQ ID NO: 6097 - DNA, 13 bp, Artificial Sequence
  Description of Artificial Sequence: Synthetic primer
caatcaagcggtc

SEQ ID NO: 6098 - DNA, 13 bp, Artificial Sequence
  Description of Artificial Sequence: Synthetic primer
gcaccgagcggaa

SEQ ID NO: 6099 - DNA, 13 bp, Artificial Sequence
  Description of Artificial Sequence: Synthetic primer
gacccgatctacg

SEQ ID NO: 6100 - DNA, 13 bp, Artificial Sequence
  Description of Artificial Sequence: Synthetic primer
gcaggaaggtttt

SEQ ID NO: 6101 - DNA, 13 bp, Artificial Sequence
  Description of Artificial Sequence: Synthetic primer
tgccacctgaaac

SEQ ID NO: 6102 - DNA, 13 bp, Artificial Sequence
  Description of Artificial Sequence: Synthetic primer
aacatcaaggacc

SEQ ID NO: 6103 - DNA, 13 bp, Artificial Sequence
  Description of Artificial Sequence: Synthetic primer
ttgggtttgggca

SEQ ID NO: 6104 - DNA, 13 bp, Artificial Sequence
  Description of Artificial Sequence: Synthetic primer
tcatcgaccggcc

SEQ ID NO: 6105 - DNA, 13 bp, Artificial Sequence
  Description of Artificial Sequence: Synthetic primer
catgtatcatggt

SEQ ID NO: 6106 - DNA, 13 bp, Artificial Sequence
  Description of Artificial Sequence: Synthetic primer
accgcttcggcat

SEQ ID NO: 6107 - DNA, 13 bp, Artificial Sequence
  Description of Artificial Sequence: Synthetic primer
actatttgcaaca

SEQ ID NO: 6108 - DNA, 13 bp, Artificial Sequence
  Description of Artificial Sequence: Synthetic primer
ctttgcgcggcaa

SEQ ID NO: 6109 - DNA, 13 bp, Artificial Sequence
  Description of Artificial Sequence: Synthetic primer
taggtacttgaat

SEQ ID NO: 6110 - DNA, 13 bp, Artificial Sequence
  Description of Artificial Sequence: Synthetic primer
gcaggatgtagcc

SEQ ID NO: 6111 - DNA, 13 bp, Artificial Sequence
  Description of Artificial Sequence: Synthetic primer
cattcctgccaga

SEQ ID NO: 6112 - DNA, 13 bp, Artificial Sequence
  Description of Artificial Sequence: Synthetic primer
atgctcaatatct

SEQ ID NO: 6113 - DNA, 13 bp, Artificial Sequence
  Description of Artificial Sequence: Synthetic primer
gaacaggggagcg

SEQ ID NO: 6114 - DNA, 13 bp, Artificial Sequence
  Description of Artificial Sequence: Synthetic primer
acttggttgagta

SEQ ID NO: 6115 - DNA, 13 bp, Artificial Sequence
  Description of Artificial Sequence: Synthetic primer
tcttgcggctaaa

SEQ ID NO: 6116 - DNA, 13 bp, Artificial Sequence
  Description of Artificial Sequence: Synthetic primer
acggaaaccatca

SEQ ID NO: 6117 - DNA, 13 bp, Artificial Sequence
  Description of Artificial Sequence: Synthetic primer
gtttccacccgta

SEQ ID NO: 6118 - DNA, 13 bp, Artificial Sequence
  Description of Artificial Sequence: Synthetic primer
tggcgtcgaggac

SEQ ID NO: 6119 - DNA, 13 bp, Artificial Sequence
  Description of Artificial Sequence: Synthetic primer
cgctgaacgagca

SEQ ID NO: 6120 - DNA, 13 bp, Artificial Sequence
  Description of Artificial Sequence: Synthetic primer
tggtcgtgctggt

SEQ ID NO: 6121 - DNA, 13 bp, Artificial Sequence
  Description of Artificial Sequence: Synthetic primer
gcgcaacgttgtt

SEQ ID NO: 6122 - DNA, 13 bp, Artificial Sequence
  Description of Artificial Sequence: Synthetic primer
tggtgccataatc

SEQ ID NO: 6123 - DNA, 13 bp, Artificial Sequence
  Description of Artificial Sequence: Synthetic primer
agatcccgtacga

SEQ ID NO: 6124 - DNA, 13 bp, Artificial Sequence
  Description of Artificial Sequence: Synthetic primer
accgcttcggtac

SEQ ID NO: 6125 - DNA, 13 bp, Artificial Sequence
  Description of Artificial Sequence: Synthetic primer
ggtgaagggccag

SEQ ID NO: 6126 - DNA, 13 bp, Artificial Sequence
  Description of Artificial Sequence: Synthetic primer
cgccttcgtcctg

SEQ ID NO: 6127 - DNA, 13 bp, Artificial Sequence
  Description of Artificial Sequence: Synthetic primer
actgccaattgca

SEQ ID NO: 6128 - DNA, 13 bp, Artificial Sequence
  Description of Artificial Sequence: Synthetic primer
gttgatcaggaag

SEQ ID NO: 6129 - DNA, 13 bp, Artificial Sequence
  Description of Artificial Sequence: Synthetic primer
tggtgaacatctt

SEQ ID NO: 6130 - DNA, 13 bp, Artificial Sequence
  Description of Artificial Sequence: Synthetic primer
tcgctacatttac

SEQ ID NO: 6131 - DNA, 13 bp, Artificial Sequence
  Description of Artificial Sequence: Synthetic primer
aatattgaccact

SEQ ID NO: 6132 - DNA, 13 bp, Artificial Sequence
  Description of Artificial Sequence: Synthetic primer
gtggttgctacac

SEQ ID NO: 6133 - DNA, 13 bp, Artificial Sequence
  Description of Artificial Sequence: Synthetic primer
cgttgcgcacgaa

SEQ ID NO: 6134 - DNA, 13 bp, Artificial Sequence
  Description of Artificial Sequence: Synthetic primer
gtgcaagtccata

SEQ ID NO: 6135 - DNA, 13 bp, Artificial Sequence
  Description of Artificial Sequence: Synthetic primer
attccagaatctc

SEQ ID NO: 6136 - DNA, 13 bp, Artificial Sequence
  Description of Artificial Sequence: Synthetic primer
agcaaccaaatgc

SEQ ID NO: 6137 - DNA, 13 bp, Artificial Sequence
  Description of Artificial Sequence: Synthetic primer
tgaatagcgcact

SEQ ID NO: 6138 - DNA, 13 bp, Artificial Sequence
  Description of Artificial Sequence: Synthetic primer
agataaggacttg

SEQ ID NO: 6139 - DNA, 13 bp, Artificial Sequence
  Description of Artificial Sequence: Synthetic primer
aaatcaattccgg

SEQ ID NO: 6140 - DNA, 13 bp, Artificial Sequence
  Description of Artificial Sequence: Synthetic primer
gttcccatcattg

SEQ ID NO: 6141 - DNA, 13 bp, Artificial Sequence
  Description of Artificial Sequence: Synthetic primer
caagtgaaaacga

SEQ ID NO: 6142 - DNA, 13 bp, Artificial Sequence
  Description of Artificial Sequence: Synthetic primer
gtatggcatggct

SEQ ID NO: 6143 - DNA, 13 bp, Artificial Sequence
  Description of Artificial Sequence: Synthetic primer
agcgttttctcct

SEQ ID NO: 6144 - DNA, 13 bp, Artificial Sequence
  Description of Artificial Sequence: Synthetic primer
aataatcatttcc

SEQ ID NO: 6145 - DNA, 13 bp, Artificial Sequence
  Description of Artificial Sequence: Synthetic primer
cgtacaatccttg

SEQ ID NO: 6146 - DNA, 13 bp, Artificial Sequence
  Description of Artificial Sequence: Synthetic primer
cgcgttttcagct

SEQ ID NO: 6147 - DNA, 13 bp, Artificial Sequence
  Description of Artificial Sequence: Synthetic primer
tggcgatgggtac

SEQ ID NO: 6148 - DNA, 13 bp, Artificial Sequence
  Description of Artificial Sequence: Synthetic primer
ttcccctttggca

SEQ ID NO: 6149 - DNA, 13 bp, Artificial Sequence
  Description of Artificial Sequence: Synthetic primer
tcattttcggcat

SEQ ID NO: 6150 - DNA, 13 bp, Artificial Sequence
  Description of Artificial Sequence: Synthetic primer
gacggcaacgtca

SEQ ID NO: 6151 - DNA, 13 bp, Artificial Sequence
  Description of Artificial Sequence: Synthetic primer
gaggtggacgtca

SEQ ID NO: 6152 - DNA, 13 bp, Artificial Sequence
  Description of Artificial Sequence: Synthetic primer
ctttcataaagtg

SEQ ID NO: 6153 - DNA, 13 bp, Artificial Sequence
  Description of Artificial Sequence: Synthetic primer
tccaggttggcgg

SEQ ID NO: 6154 - DNA, 13 bp, Artificial Sequence
  Description of Artificial Sequence: Synthetic primer
cgagcgtgcgatg

SEQ ID NO: 6155 - DNA, 13 bp, Artificial Sequence
  Description of Artificial Sequence: Synthetic primer
gtggccgggatga

SEQ ID NO: 6156 - DNA, 13 bp, Artificial Sequence
  Description of Artificial Sequence: Synthetic primer
cgaccagtcgctg

SEQ ID NO: 6157 - DNA, 13 bp, Artificial Sequence
  Description of Artificial Sequence: Synthetic primer
gcttgcgtaggct

SEQ ID NO: 6158 - DNA, 13 bp, Artificial Sequence
  Description of Artificial Sequence: Synthetic primer
cctggtaagcctg

SEQ ID NO: 6159 - DNA, 13 bp, Artificial Sequence
  Description of Artificial Sequence: Synthetic primer
taacgaggcgctg

SEQ ID NO: 6160 - DNA, 13 bp, Artificial Sequence
  Description of Artificial Sequence: Synthetic primer
cacggagccttgg

SEQ ID NO: 6161 - DNA, 13 bp, Artificial Sequence
  Description of Artificial Sequence: Synthetic primer
atagccggcggag

SEQ ID NO: 6162 - DNA, 13 bp, Artificial Sequence
  Description of Artificial Sequence: Synthetic primer
aagtggccacggc

SEQ ID NO: 6163 - DNA, 13 bp, Artificial Sequence
  Description of Artificial Sequence: Synthetic primer
cagggtgttgatc

SEQ ID NO: 6164 - DNA, 13 bp, Artificial Sequence
  Description of Artificial Sequence: Synthetic primer
gttatatactgat

SEQ ID NO: 6165 - DNA, 13 bp, Artificial Sequence
  Description of Artificial Sequence: Synthetic primer
aacggccaggaag

SEQ ID NO: 6166 - DNA, 13 bp, Artificial Sequence
  Description of Artificial Sequence: Synthetic primer
agctcgaaccagc

SEQ ID NO: 6167 - DNA, 13 bp, Artificial Sequence
  Description of Artificial Sequence: Synthetic primer
cactcctccattg

SEQ ID NO: 6168 - DNA, 13 bp, Artificial Sequence
  Description of Artificial Sequence: Synthetic primer
cataataacagct

SEQ ID NO: 6169 - DNA, 13 bp, Artificial Sequence
  Description of Artificial Sequence: Synthetic primer
gatcgggatcgcg

SEQ ID NO: 6170 - DNA, 13 bp, Artificial Sequence
  Description of Artificial Sequence: Synthetic primer
gtcggggtcatga

SEQ ID NO: 6171 - DNA, 13 bp, Artificial Sequence
  Description of Artificial Sequence: Synthetic primer
tctcgacgacggg

SEQ ID NO: 6172 - DNA, 13 bp, Artificial Sequence
  Description of Artificial Sequence: Synthetic primer
cctatctgcgcga

SEQ ID NO: 6173 - DNA, 13 bp, Artificial Sequence
  Description of Artificial Sequence: Synthetic primer
tatttggtggagt

SEQ ID NO: 6174 - DNA, 13 bp, Artificial Sequence
  Description of Artificial Sequence: Synthetic primer
atgtcgccaactt

SEQ ID NO: 6175 - DNA, 13 bp, Artificial Sequence
  Description of Artificial Sequence: Synthetic primer
ccacgacacctta

SEQ ID NO: 6176 - DNA, 13 bp, Artificial Sequence
  Description of Artificial Sequence: Synthetic primer
tcgctcgcgttga

SEQ ID NO: 6177 - DNA, 13 bp, Artificial Sequence
  Description of Artificial Sequence: Synthetic primer
ggcggacatgcat

SEQ ID NO: 6178 - DNA, 13 bp, Artificial Sequence
  Description of Artificial Sequence: Synthetic primer
gtctgctcaaggg

SEQ ID NO: 6179 - DNA, 13 bp, Artificial Sequence
  Description of Artificial Sequence: Synthetic primer
cattgctggtgtg

SEQ ID NO: 6180 - DNA, 13 bp, Artificial Sequence
  Description of Artificial Sequence: Synthetic primer
aggaactcggtca

SEQ ID NO: 6181 - DNA, 13 bp, Artificial Sequence
  Description of Artificial Sequence: Synthetic primer
taagcactttctg

SEQ ID NO: 6182 - DNA, 13 bp, Artificial Sequence
  Description of Artificial Sequence: Synthetic primer
ctatgctggggtt

SEQ ID NO: 6183 - DNA, 13 bp, Artificial Sequence
  Description of Artificial Sequence: Synthetic primer
cacttgctgactt

SEQ ID NO: 6184 - DNA, 13 bp, Artificial Sequence
  Description of Artificial Sequence: Synthetic primer
gcactgctcaggg

SEQ ID NO: 6185 - DNA, 13 bp, Artificial Sequence
  Description of Artificial Sequence: Synthetic primer
catgtagagcgcg

SEQ ID NO: 6186 - DNA, 13 bp, Artificial Sequence
  Description of Artificial Sequence: Synthetic primer
cgttattcgatgc

SEQ ID NO: 6187 - DNA, 13 bp, Artificial Sequence
  Description of Artificial Sequence: Synthetic primer
tacgcccgtggtc

SEQ ID NO: 6188 - DNA, 13 bp, Artificial Sequence
  Description of Artificial Sequence: Synthetic primer
tcgaacagaatat

SEQ ID NO: 6189 - DNA, 13 bp, Artificial Sequence
  Description of Artificial Sequence: Synthetic primer
cgctggttccgtg

SEQ ID NO: 6190 - DNA, 13 bp, Artificial Sequence
  Description of Artificial Sequence: Synthetic primer
ctcccagccaagt

SEQ ID NO: 6191 - DNA, 13 bp, Artificial Sequence
  Description of Artificial Sequence: Synthetic primer
gcggaccacgttc

SEQ ID NO: 6192 - DNA, 13 bp, Artificial Sequence
  Description of Artificial Sequence: Synthetic primer
gcaggtattcgcg

SEQ ID NO: 6193 - DNA, 13 bp, Artificial Sequence
  Description of Artificial Sequence: Synthetic primer
caatatgctgggc

SEQ ID NO: 6194 - DNA, 13 bp, Artificial Sequence
  Description of Artificial Sequence: Synthetic primer
gttgcgggagaag

SEQ ID NO: 6195 - DNA, 13 bp, Artificial Sequence
  Description of Artificial Sequence: Synthetic primer
caatggcgttaat

SEQ ID NO: 6196 - DNA, 13 bp, Artificial Sequence
  Description of Artificial Sequence: Synthetic primer
ttcgcgatgacga

SEQ ID NO: 6197 - DNA, 13 bp, Artificial Sequence
  Description of Artificial Sequence: Synthetic primer
cgtagtcaacaac

SEQ ID NO: 6198 - DNA, 13 bp, Artificial Sequence
  Description of Artificial Sequence: Synthetic primer
atcactcggcatg

SEQ ID NO: 6199 - DNA, 13 bp, Artificial Sequence
  Description of Artificial Sequence: Synthetic primer
tgcttttaaggtt

SEQ ID NO: 6200 - DNA, 13 bp, Artificial Sequence
  Description of Artificial Sequence: Synthetic primer
tggaacggcagct

SEQ ID NO: 6201 - DNA, 13 bp, Artificial Sequence
  Description of Artificial Sequence: Synthetic primer
tttaccgtggcgt

SEQ ID NO: 6202 - DNA, 13 bp, Artificial Sequence
  Description of Artificial Sequence: Synthetic primer
tgacgggacgtat

SEQ ID NO: 6203 - DNA, 13 bp, Artificial Sequence
  Description of Artificial Sequence: Synthetic primer
aggaaagctgcct

SEQ ID NO: 6204 - DNA, 13 bp, Artificial Sequence
  Description of Artificial Sequence: Synthetic primer
ctaggttttaatt

SEQ ID NO: 6205 - DNA, 13 bp, Artificial Sequence
  Description of Artificial Sequence: Synthetic primer
taacttttgtttg

SEQ ID NO: 6206 - DNA, 13 bp, Artificial Sequence
  Description of Artificial Sequence: Synthetic primer
caccgtctgaccc

SEQ ID NO: 6207 - DNA, 13 bp, Artificial Sequence
  Description of Artificial Sequence: Synthetic primer
ttttgcttgggtt

SEQ ID NO: 6208 - DNA, 13 bp, Artificial Sequence
  Description of Artificial Sequence: Synthetic primer
ttaagaagcgcta

SEQ ID NO: 6209 - DNA, 13 bp, Artificial Sequence
  Description of Artificial Sequence: Synthetic primer
agtcccagttgct

SEQ ID NO: 6210 - DNA, 13 bp, Artificial Sequence
  Description of Artificial Sequence: Synthetic primer
acaataatcgtca

SEQ ID NO: 6211 - DNA, 13 bp, Artificial Sequence
  Description of Artificial Sequence: Synthetic primer
agcaatagttaat

SEQ ID NO: 6212 - DNA, 13 bp, Artificial Sequence
  Description of Artificial Sequence: Synthetic primer
gttcctctttggc

SEQ ID NO: 6213 - DNA, 13 bp, Artificial Sequence
  Description of Artificial Sequence: Synthetic primer
atcttgaaattca

SEQ ID NO: 6214 - DNA, 13 bp, Artificial Sequence
  Description of Artificial Sequence: Synthetic primer
gctgttgtccttc

SEQ ID NO: 6215 - DNA, 13 bp, Artificial Sequence
  Description of Artificial Sequence: Synthetic primer
ctggtggtgtccc

SEQ ID NO: 6216 - DNA, 13 bp, Artificial Sequence
  Description of Artificial Sequence: Synthetic primer
gttgcgccattgg

SEQ ID NO: 6217 - DNA, 13 bp, Artificial Sequence
  Description of Artificial Sequence: Synthetic primer
gctgccgcaggaa

SEQ ID NO: 6218 - DNA, 13 bp, Artificial Sequence
  Description of Artificial Sequence: Synthetic primer
taaagattttgct

SEQ ID NO: 6219 - DNA, 13 bp, Artificial Sequence
  Description of Artificial Sequence: Synthetic primer
ccgtggggatctg

SEQ ID NO: 6220 - DNA, 13 bp, Artificial Sequence
  Description of Artificial Sequence: Synthetic primer
gtgcacaccctgt

SEQ ID NO: 6221 - DNA, 13 bp, Artificial Sequence
  Description of Artificial Sequence: Synthetic primer
tttcaggtgtcct

SEQ ID NO: 6222 - DNA, 13 bp, Artificial Sequence
  Description of Artificial Sequence: Synthetic primer
cagcggatttcgt

SEQ ID NO: 6223 - DNA, 13 bp, Artificial Sequence
  Description of Artificial Sequence: Synthetic primer
atgactttcacag

SEQ ID NO: 6224 - DNA, 13 bp, Artificial Sequence
  Description of Artificial Sequence: Synthetic primer
catttggcacccc

SEQ ID NO: 6225 - DNA, 13 bp, Artificial Sequence
  Description of Artificial Sequence: Synthetic primer
tctacacttgaag

SEQ ID NO: 6226 - DNA, 13 bp, Artificial Sequence
  Description of Artificial Sequence: Synthetic primer
tcgatccggagcg

SEQ ID NO: 6227 - DNA, 13 bp, Artificial Sequence
  Description of Artificial Sequence: Synthetic primer
tgcctcaacgcgt

SEQ ID NO: 6228 - DNA, 13 bp, Artificial Sequence
  Description of Artificial Sequence: Synthetic primer
tttaccgacctgt

SEQ ID NO: 6229 - DNA, 13 bp, Artificial Sequence
  Description of Artificial Sequence: Synthetic primer
gcctgtcgccaag

SEQ ID NO: 6230 - DNA, 13 bp, Artificial Sequence
  Description of Artificial Sequence: Synthetic primer
cgtgcgttccagc

SEQ ID NO: 6231 - DNA, 13 bp, Artificial Sequence
  Description of Artificial Sequence: Synthetic primer
atgatatcctctt

SEQ ID NO: 6232 - DNA, 13 bp, Artificial Sequence
  Description of Artificial Sequence: Synthetic primer
cagcatttgcttt

SEQ ID NO: 6233 - DNA, 13 bp, Artificial Sequence
  Description of Artificial Sequence: Synthetic primer
cttagcatattta

SEQ ID NO: 6234 - DNA, 13 bp, Artificial Sequence
  Description of Artificial Sequence: Synthetic primer
tcaaacgatcacg

SEQ ID NO: 6235 - DNA, 13 bp, Artificial Sequence
  Description of Artificial Sequence: Synthetic primer
tttcggcttcagc

SEQ ID NO: 6236 - DNA, 13 bp, Artificial Sequence
  Description of Artificial Sequence: Synthetic primer
tgatgctgttgtc

SEQ ID NO: 6237 - DNA, 13 bp, Artificial Sequence
  Description of Artificial Sequence: Synthetic primer
cgccgcgttcgtt

SEQ ID NO: 6238 - DNA, 13 bp, Artificial Sequence
  Description of Artificial Sequence: Synthetic primer
tcgaacatgcggt

SEQ ID NO: 6239 - DNA, 13 bp, Artificial Sequence
  Description of Artificial Sequence: Synthetic primer
cccagctgcaaca

SEQ ID NO: 6240 - DNA, 13 bp, Artificial Sequence
  Description of Artificial Sequence: Synthetic primer
gaacagcagtata

SEQ ID NO: 6241 - DNA, 13 bp, Artificial Sequence
  Description of Artificial Sequence: Synthetic primer
gtcgtgattgtct

SEQ ID NO: 6242 - DNA, 13 bp, Artificial Sequence
  Description of Artificial Sequence: Synthetic primer
ggtcagatagtat

SEQ ID NO: 6243 - DNA, 13 bp, Artificial Sequence
  Description of Artificial Sequence: Synthetic primer
ggacgtcgattgc

SEQ ID NO: 6244 - DNA, 13 bp, Artificial Sequence
  Description of Artificial Sequence: Synthetic primer
aacgaggagtgga

SEQ ID NO: 6245 - DNA, 13 bp, Artificial Sequence
  Description of Artificial Sequence: Synthetic primer
gcttcgaattgcg

SEQ ID NO: 6246 - DNA, 13 bp, Artificial Sequence
  Description of Artificial Sequence: Synthetic primer
tggcggtgaagcc

SEQ ID NO: 6247 - DNA, 13 bp, Artificial Sequence
  Description of Artificial Sequence: Synthetic primer
gctttggatattt

SEQ ID NO: 6248 - DNA, 13 bp, Artificial Sequence
  Description of Artificial Sequence: Synthetic primer
cggctggaaatcg

SEQ ID NO: 6249 - DNA, 13 bp, Artificial Sequence
  Description of Artificial Sequence: Synthetic primer
acatcagcttatc

SEQ ID NO: 6250 - DNA, 13 bp, Artificial Sequence
  Description of Artificial Sequence: Synthetic primer
catgcccacccgt

SEQ ID NO: 6251 - DNA, 13 bp, Artificial Sequence
  Description of Artificial Sequence: Synthetic primer
cgccccagacatt

SEQ ID NO: 6252 - DNA, 13 bp, Artificial Sequence
  Description of Artificial Sequence: Synthetic primer
ataacagtgatgt

SEQ ID NO: 6253 - DNA, 13 bp, Artificial Sequence
  Description of Artificial Sequence: Synthetic primer
gccgatcgcgatc

SEQ ID NO: 6254 - DNA, 13 bp, Artificial Sequence
  Description of Artificial Sequence: Synthetic primer
gcttgagcacgtg

SEQ ID NO: 6255 - DNA, 13 bp, Artificial Sequence
  Description of Artificial Sequence: Synthetic primer
ttggcgaccaggc

SEQ ID NO: 6256 - DNA, 13 bp, Artificial Sequence
  Description of Artificial Sequence: Synthetic primer
tcgaggtcgctgt

SEQ ID NO: 6257 - DNA, 13 bp, Artificial Sequence
  Description of Artificial Sequence: Synthetic primer
gatgccccaatgc

SEQ ID NO: 6258 - DNA, 13 bp, Artificial Sequence
  Description of Artificial Sequence: Synthetic primer
ttcgtaggtcacg

SEQ ID NO: 6259 - DNA, 13 bp, Artificial Sequence
  Description of Artificial Sequence: Synthetic primer
gcggtagatcgcc

SEQ ID NO: 6260 - DNA, 13 bp, Artificial Sequence
  Description of Artificial Sequence: Synthetic primer
gctcctggcgctt

SEQ ID NO: 6261 - DNA, 13 bp, Artificial Sequence
  Description of Artificial Sequence: Synthetic primer
accccgccaccta

SEQ ID NO: 6262 - DNA, 13 bp, Artificial Sequence
  Description of Artificial Sequence: Synthetic primer
tatggggcagaac

SEQ ID NO: 6263 - DNA, 13 bp, Artificial Sequence
  Description of Artificial Sequence: Synthetic primer
actggattggtac

SEQ ID NO: 6264 - DNA, 13 bp, Artificial Sequence
  Description of Artificial Sequence: Synthetic primer
cggtgagaatggc

SEQ ID NO: 6265 - DNA, 13 bp, Artificial Sequence
  Description of Artificial Sequence: Synthetic primer
gtggaaatcgcca

SEQ ID NO: 6266 - DNA, 13 bp, Artificial Sequence
  Description of Artificial Sequence: Synthetic primer
cacgctgcgcatc

SEQ ID NO: 6267 - DNA, 13 bp, Artificial Sequence
  Description of Artificial Sequence: Synthetic primer
aaggataaggcca

SEQ ID NO: 6268 - DNA, 13 bp, Artificial Sequence
  Description of Artificial Sequence: Synthetic primer
attgaattagaca

SEQ ID NO: 6269 - DNA, 13 bp, Artificial Sequence
  Description of Artificial Sequence: Synthetic primer
agtcgcattcggc

SEQ ID NO: 6270 - DNA, 13 bp, Artificial Sequence
  Description of Artificial Sequence: Synthetic primer
catattgttctaa

SEQ ID NO: 6271 - DNA, 13 bp, Artificial Sequence
  Description of Artificial Sequence: Synthetic primer
tctgcatcaaagg

SEQ ID NO: 6272 - DNA, 13 bp, Artificial Sequence
  Description of Artificial Sequence: Synthetic primer
tggcgatgtccgc

SEQ ID NO: 6273 - DNA, 13 bp, Artificial Sequence
  Description of Artificial Sequence: Synthetic primer
atcgtgccagagg

SEQ ID NO: 6274 - DNA, 13 bp, Artificial Sequence
  Description of Artificial Sequence: Synthetic primer
ggacacgctgtgg

SEQ ID NO: 6275 - DNA, 13 bp, Artificial Sequence
  Description of Artificial Sequence: Synthetic primer
cgaagcgatggtc

SEQ ID NO: 6276 - DNA, 13 bp, Artificial Sequence
  Description of Artificial Sequence: Synthetic primer
tcgccatttccga

SEQ ID NO: 6277 - DNA, 13 bp, Artificial Sequence
  Description of Artificial Sequence: Synthetic primer
gatcactggtgcc

SEQ ID NO: 6278 - DNA, 13 bp, Artificial Sequence
  Description of Artificial Sequence: Synthetic primer
ttacttcccaacc

SEQ ID NO: 6279 - DNA, 13 bp, Artificial Sequence
  Description of Artificial Sequence: Synthetic primer
tagcagtgaagta

SEQ ID NO: 6280 - DNA, 13 bp, Artificial Sequence
  Description of Artificial Sequence: Synthetic primer
tagttgtgtgttg

SEQ ID NO: 6281 - DNA, 13 bp, Artificial Sequence
  Description of Artificial Sequence: Synthetic primer
ttctgcgcgagct

SEQ ID NO: 6282 - DNA, 13 bp, Artificial Sequence
  Description of Artificial Sequence: Synthetic primer
ccagcatcaagct

SEQ ID NO: 6283 - DNA, 13 bp, Artificial Sequence
  Description of Artificial Sequence: Synthetic primer
gagtctggctcat

SEQ ID NO: 6284 - DNA, 13 bp, Artificial Sequence
  Description of Artificial Sequence: Synthetic primer
cagcttccgtgag

SEQ ID NO: 6285 - DNA, 13 bp, Artificial Sequence
  Description of Artificial Sequence: Synthetic primer
ggaattgtggatg

SEQ ID NO: 6286 - DNA, 13 bp, Artificial Sequence
  Description of Artificial Sequence: Synthetic primer
tttcggcaaagcc

SEQ ID NO: 6287 - DNA, 13 bp, Artificial Sequence
  Description of Artificial Sequence: Synthetic primer
gacagtgttattc

SEQ ID NO: 6288 - DNA, 13 bp, Artificial Sequence
  Description of Artificial Sequence: Synthetic primer
acttttcgtcggt

SEQ ID NO: 6289 - DNA, 13 bp, Artificial Sequence
  Description of Artificial Sequence: Synthetic primer
atgtgagcggtaa

SEQ ID NO: 6290 - DNA, 13 bp, Artificial Sequence
  Description of Artificial Sequence: Synthetic primer
gaccctcgatgct

SEQ ID NO: 6291 - DNA, 13 bp, Artificial Sequence
  Description of Artificial Sequence: Synthetic primer
ggtccatgctcgt

SEQ ID NO: 6292 - DNA, 13 bp, Artificial Sequence
  Description of Artificial Sequence: Synthetic primer
gcattcgttgcta

SEQ ID NO: 6293 - DNA, 13 bp, Artificial Sequence
  Description of Artificial Sequence: Synthetic primer
ccgttgtaacgtt

SEQ ID NO: 6294 - DNA, 13 bp, Artificial Sequence
  Description of Artificial Sequence: Synthetic primer
gctgcaacgacag

SEQ ID NO: 6295 - DNA, 13 bp, Artificial Sequence
  Description of Artificial Sequence: Synthetic primer
agtagtgagttaa

SEQ ID NO: 6296 - DNA, 13 bp, Artificial Sequence
  Description of Artificial Sequence: Synthetic primer
atcgaaccgcgcc

SEQ ID NO: 6297 - DNA, 13 bp, Artificial Sequence
  Description of Artificial Sequence: Synthetic primer
gaaacccggcttt

SEQ ID NO: 6298 - DNA, 13 bp, Artificial Sequence
  Description of Artificial Sequence: Synthetic primer
gcgagcaccagga

SEQ ID NO: 6299 - DNA, 13 bp, Artificial Sequence
  Description of Artificial Sequence: Synthetic primer
gtcgtagtcgaaa

SEQ ID NO: 6300 - DNA, 13 bp, Artificial Sequence
  Description of Artificial Sequence: Synthetic primer
gtgctgcatgaaa

SEQ ID NO: 6301 - DNA, 13 bp, Artificial Sequence
  Description of Artificial Sequence: Synthetic primer
cgtccgtactctg

SEQ ID NO: 6302 - DNA, 13 bp, Artificial Sequence
  Description of Artificial Sequence: Synthetic primer
agaagagctctac

SEQ ID NO: 6303 - DNA, 13 bp, Artificial Sequence
  Description of Artificial Sequence: Synthetic primer
tctggttggcgaa

SEQ ID NO: 6304 - DNA, 13 bp, Artificial Sequence
  Description of Artificial Sequence: Synthetic primer
gctcaactccctg

SEQ ID NO: 6305 - DNA, 13 bp, Artificial Sequence
  Description of Artificial Sequence: Synthetic primer
ctggtcgaagcga

SEQ ID NO: 6306 - DNA, 13 bp, Artificial Sequence
  Description of Artificial Sequence: Synthetic primer
tttgtttgggtgt

SEQ ID NO: 6307 - DNA, 13 bp, Artificial Sequence
  Description of Artificial Sequence: Synthetic primer
cggtgttctgttc

SEQ ID NO: 6308 - DNA, 13 bp, Artificial Sequence
  Description of Artificial Sequence: Synthetic primer
gaggggatagcag

SEQ ID NO: 6309 - DNA, 13 bp, Artificial Sequence
  Description of Artificial Sequence: Synthetic primer
ggcctgcatattc

SEQ ID NO: 6310 - DNA, 13 bp, Artificial Sequence
  Description of Artificial Sequence: Synthetic primer
cgccatcctcctg

SEQ ID NO: 6311 - DNA, 13 bp, Artificial Sequence
  Description of Artificial Sequence: Synthetic primer
tactattagctgg

SEQ ID NO: 6312 - DNA, 13 bp, Artificial Sequence
  Description of Artificial Sequence: Synthetic primer
atccaggatccgc

SEQ ID NO: 6313 - DNA, 13 bp, Artificial Sequence
  Description of Artificial Sequence: Synthetic primer
cgatgtaccacca

SEQ ID NO: 6314 - DNA, 13 bp, Artificial Sequence
  Description of Artificial Sequence: Synthetic primer
gcgctgatgctca

SEQ ID NO: 6315 - DNA, 13 bp, Artificial Sequence
  Description of Artificial Sequence: Synthetic primer
gttttcggaacgt

SEQ ID NO: 6316 - DNA, 13 bp, Artificial Sequence
  Description of Artificial Sequence: Synthetic primer
taggcattgaatc

SEQ ID NO: 6317 - DNA, 13 bp, Artificial Sequence
  Description of Artificial Sequence: Synthetic primer
cgctgcgtaaggt

SEQ ID NO: 6318 - DNA, 13 bp, Artificial Sequence
  Description of Artificial Sequence: Synthetic primer
tcgaatcctcgaa

SEQ ID NO: 6319 - DNA, 13 bp, Artificial Sequence
  Description of Artificial Sequence: Synthetic primer
gtcgcctggttgt

SEQ ID NO: 6320 - DNA, 13 bp, Artificial Sequence
  Description of Artificial Sequence: Synthetic primer
catgtctcaaaat

SEQ ID NO: 6321 - DNA, 13 bp, Artificial Sequence
  Description of Artificial Sequence: Synthetic primer
cgtactttctgca

SEQ ID NO: 6322 - DNA, 13 bp, Artificial Sequence
  Description of Artificial Sequence: Synthetic primer
gaagaatactggc

SEQ ID NO: 6323 - DNA, 13 bp, Artificial Sequence
  Description of Artificial Sequence: Synthetic primer
ttaattgtcggta

SEQ ID NO: 6324 - DNA, 13 bp, Artificial Sequence
  Description of Artificial Sequence: Synthetic primer
ccatagcgttaag

SEQ ID NO: 6325 - DNA, 13 bp, Artificial Sequence
  Description of Artificial Sequence: Synthetic primer
aaggagcgaagcg

SEQ ID NO: 6326 - DNA, 13 bp, Artificial Sequence
  Description of Artificial Sequence: Synthetic primer
cacgtcgactttc

SEQ ID NO: 6327 - DNA, 13 bp, Artificial Sequence
  Description of Artificial Sequence: Synthetic primer
ttttgaatatgtg

SEQ ID NO: 6328 - DNA, 13 bp, Artificial Sequence
  Description of Artificial Sequence: Synthetic primer
aggccacaccgaa

SEQ ID NO: 6329 - DNA, 13 bp, Artificial Sequence
  Description of Artificial Sequence: Synthetic primer
cggtattgccgtt

SEQ ID NO: 6330 - DNA, 13 bp, Artificial Sequence
  Description of Artificial Sequence: Synthetic primer
caggcctacgaga

SEQ ID NO: 6331 - DNA, 13 bp, Artificial Sequence
  Description of Artificial Sequence: Synthetic primer
tcgacgcgtacca

SEQ ID NO: 6332 - DNA, 13 bp, Artificial Sequence
  Description of Artificial Sequence: Synthetic primer
ccaatgcaccttc

SEQ ID NO: 6333 - DNA, 13 bp, Artificial Sequence
  Description of Artificial Sequence: Synthetic primer
ggatgagatgcga

SEQ ID NO: 6334 - DNA, 13 bp, Artificial Sequence
  Description of Artificial Sequence: Synthetic primer
atgctcgtgcagc

SEQ ID NO: 6335 - DNA, 13 bp, Artificial Sequence
  Description of Artificial Sequence: Synthetic primer
tgctccagcgtgg

SEQ ID NO: 6336 - DNA, 13 bp, Artificial Sequence
  Description of Artificial Sequence: Synthetic primer
atttcccttgaaa

SEQ ID NO: 6337 - DNA, 13 bp, Artificial Sequence
  Description of Artificial Sequence: Synthetic primer
ctaaaacaactat

SEQ ID NO: 6338 - DNA, 13 bp, Artificial Sequence
  Description of Artificial Sequence: Synthetic primer
actgcacagccac

SEQ ID NO: 6339 - DNA, 13 bp, Artificial Sequence
  Description of Artificial Sequence: Synthetic primer
ttcatcgtccgga

SEQ ID NO: 6340 - DNA, 13 bp, Artificial Sequence
  Description of Artificial Sequence: Synthetic primer
acgaatgcctggt

SEQ ID NO: 6341 - DNA, 13 bp, Artificial Sequence
  Description of Artificial Sequence: Synthetic primer
gagtatatcccct

SEQ ID NO: 6342 - DNA, 13 bp, Artificial Sequence
  Description of Artificial Sequence: Synthetic primer
gagcctgcgccat

SEQ ID NO: 6343 - DNA, 13 bp, Artificial Sequence
  Description of Artificial Sequence: Synthetic primer
aatctgggaggta

SEQ ID NO: 6344 - DNA, 13 bp, Artificial Sequence
  Description of Artificial Sequence: Synthetic primer
gtcgcgctcaacc

SEQ ID NO: 6345 - DNA, 13 bp, Artificial Sequence
  Description of Artificial Sequence: Synthetic primer
tatacgatggtgg

SEQ ID NO: 6346 - DNA, 13 bp, Artificial Sequence
  Description of Artificial Sequence: Synthetic primer
gcttttatgcttg

SEQ ID NO: 6347 - DNA, 13 bp, Artificial Sequence
  Description of Artificial Sequence: Synthetic primer
cttgcagagcctg

SEQ ID NO: 6348 - DNA, 13 bp, Artificial Sequence
  Description of Artificial Sequence: Synthetic primer
ttttctgatgccc

SEQ ID NO: 6349 - DNA, 13 bp, Artificial Sequence
  Description of Artificial Sequence: Synthetic primer
cacagggaggaat

SEQ ID NO: 6350 - DNA, 13 bp, Artificial Sequence
  Description of Artificial Sequence: Synthetic primer
gacgttggccatg

SEQ ID NO: 6351 - DNA, 13 bp, Artificial Sequence
  Description of Artificial Sequence: Synthetic primer
tcagataatccga

SEQ ID NO: 6352 - DNA, 13 bp, Artificial Sequence
  Description of Artificial Sequence: Synthetic primer
aggatgagaggct

SEQ ID NO: 6353 - DNA, 13 bp, Artificial Sequence
  Description of Artificial Sequence: Synthetic primer
ctgttgccaactt

SEQ ID NO: 6354 - DNA, 13 bp, Artificial Sequence
  Description of Artificial Sequence: Synthetic primer
ttctggcttatca

SEQ ID NO: 6355 - DNA, 13 bp, Artificial Sequence
  Description of Artificial Sequence: Synthetic primer
aagatcataccgg

SEQ ID NO: 6356 - DNA, 13 bp, Artificial Sequence
  Description of Artificial Sequence: Synthetic primer
catgagagtgact

SEQ ID NO: 6357 - DNA, 13 bp, Artificial Sequence
  Description of Artificial Sequence: Synthetic primer
gtccaaccttctt

SEQ ID NO: 6358 - DNA, 13 bp, Artificial Sequence
  Description of Artificial Sequence: Synthetic primer
tcgggctcttgac

SEQ ID NO: 6359 - DNA, 13 bp, Artificial Sequence
  Description of Artificial Sequence: Synthetic primer
attaatggcactt

SEQ ID NO: 6360 - DNA, 13 bp, Artificial Sequence
  Description of Artificial Sequence: Synthetic primer
catatcatgaaag

SEQ ID NO: 6361 - DNA, 13 bp, Artificial Sequence
  Description of Artificial Sequence: Synthetic primer
gcggaacgacgtc

SEQ ID NO: 6362 - DNA, 13 bp, Artificial Sequence
  Description of Artificial Sequence: Synthetic primer
aaaggcaaaatat

SEQ ID NO: 6363 - DNA, 13 bp, Artificial Sequence
  Description of Artificial Sequence: Synthetic primer
aaacatggaaaag

SEQ ID NO: 6364 - DNA, 13 bp, Artificial Sequence
  Description of Artificial Sequence: Synthetic primer
gtgcgctggtcac

SEQ ID NO: 6365 - DNA, 13 bp, Artificial Sequence
  Description of Artificial Sequence: Synthetic primer
gtaataacttgac

SEQ ID NO: 6366 - DNA, 13 bp, Artificial Sequence
  Description of Artificial Sequence: Synthetic primer
aaggttaattgga

SEQ ID NO: 6367 - DNA, 13 bp, Artificial Sequence
  Description of Artificial Sequence: Synthetic primer
aacgtgtggcgtc

SEQ ID NO: 6368 - DNA, 13 bp, Artificial Sequence
  Description of Artificial Sequence: Synthetic primer
gcggaggcacgat

SEQ ID NO: 6369 - DNA, 13 bp, Artificial Sequence
  Description of Artificial Sequence: Synthetic primer
ctgattagcggta

SEQ ID NO: 6370 - DNA, 13 bp, Artificial Sequence
  Description of Artificial Sequence: Synthetic primer
tagaatatgcacc

SEQ ID NO: 6371 - DNA, 13 bp, Artificial Sequence
  Description of Artificial Sequence: Synthetic primer
ccgaatgtcggtt

SEQ ID NO: 6372 - DNA, 13 bp, Artificial Sequence
  Description of Artificial Sequence: Synthetic primer
agcactcttggtg

SEQ ID NO: 6373 - DNA, 13 bp, Artificial Sequence
  Description of Artificial Sequence: Synthetic primer
gcggcgaatcttt

SEQ ID NO: 6374 - DNA, 13 bp, Artificial Sequence
  Description of Artificial Sequence: Synthetic primer
atggtggtattct

SEQ ID NO: 6375 - DNA, 13 bp, Artificial Sequence
  Description of Artificial Sequence: Synthetic primer
ctgcggacgacga

SEQ ID NO: 6376 - DNA, 13 bp, Artificial Sequence
  Description of Artificial Sequence: Synthetic primer
cggagttcatcgg

SEQ ID NO: 6377 - DNA, 13 bp, Artificial Sequence
  Description of Artificial Sequence: Synthetic primer
attaagcagactg

SEQ ID NO: 6378 - DNA, 13 bp, Artificial Sequence
  Description of Artificial Sequence: Synthetic primer
tggctccttgtgc

SEQ ID NO: 6379 - DNA, 13 bp, Artificial Sequence
  Description of Artificial Sequence: Synthetic primer
tgagttgcttctt

SEQ ID NO: 6380 - DNA, 13 bp, Artificial Sequence
  Description of Artificial Sequence: Synthetic primer
ccaggtgagcgga

SEQ ID NO: 6381 - DNA, 13 bp, Artificial Sequence
  Description of Artificial Sequence: Synthetic primer
catgaagcaaata

SEQ ID NO: 6382 - DNA, 13 bp, Artificial Sequence
  Description of Artificial Sequence: Synthetic primer
ggattctcctcgt

SEQ ID NO: 6383 - DNA, 13 bp, Artificial Sequence
  Description of Artificial Sequence: Synthetic primer
gttcgatcctgcc

SEQ ID NO: 6384 - DNA, 13 bp, Artificial Sequence
  Description of Artificial Sequence: Synthetic primer
aacgcttttaaac

SEQ ID NO: 6385 - DNA, 13 bp, Artificial Sequence
  Description of Artificial Sequence: Synthetic primer
caccgccacgaaa

SEQ ID NO: 6386 - DNA, 13 bp, Artificial Sequence
  Description of Artificial Sequence: Synthetic primer
gaacgcaaacttg

SEQ ID NO: 6387 - DNA, 13 bp, Artificial Sequence
  Description of Artificial Sequence: Synthetic primer
tcgccttcggcct

SEQ ID NO: 6388 - DNA, 13 bp, Artificial Sequence
  Description of Artificial Sequence: Synthetic primer
cattgccgatcgc

SEQ ID NO: 6389 - DNA, 13 bp, Artificial Sequence
  Description of Artificial Sequence: Synthetic primer
ctgcagcttgaag

SEQ ID NO: 6390 - DNA, 13 bp, Artificial Sequence
  Description of Artificial Sequence: Synthetic primer
aatgtctgaagag

SEQ ID NO: 6391 - DNA, 13 bp, Artificial Sequence
  Description of Artificial Sequence: Synthetic primer
gaaagcgcgaaag

SEQ ID NO: 6392 - DNA, 13 bp, Artificial Sequence
  Description of Artificial Sequence: Synthetic primer
aaacggattagaa

SEQ ID NO: 6393 - DNA, 13 bp, Artificial Sequence
  Description of Artificial Sequence: Synthetic primer
tcggcaccaggct

SEQ ID NO: 6394 - DNA, 13 bp, Artificial Sequence
  Description of Artificial Sequence: Synthetic primer
gcagctccatcac

SEQ ID NO: 6395 - DNA, 13 bp, Artificial Sequence
  Description of Artificial Sequence: Synthetic primer
agcacgaacatct

SEQ ID NO: 6396 - DNA, 13 bp, Artificial Sequence
  Description of Artificial Sequence: Synthetic primer
gcgcgtctgttat

SEQ ID NO: 6397 - DNA, 13 bp, Artificial Sequence
  Description of Artificial Sequence: Synthetic primer
gagtgctggtgag

SEQ ID NO: 6398 - DNA, 13 bp, Artificial Sequence
  Description of Artificial Sequence: Synthetic primer
cgatcaaggattc

SEQ ID NO: 6399 - DNA, 13 bp, Artificial Sequence
  Description of Artificial Sequence: Synthetic primer
gcagtaatttggc

SEQ ID NO: 6400 - DNA, 13 bp, Artificial Sequence
  Description of Artificial Sequence: Synthetic primer
tagtttaggcgtt

SEQ ID NO: 6401 - DNA, 13 bp, Artificial Sequence
  Description of Artificial Sequence: Synthetic primer
agccaaatagcga

SEQ ID NO: 6402 - DNA, 13 bp, Artificial Sequence
  Description of Artificial Sequence: Synthetic primer
gttttgttacctc

SEQ ID NO: 6403 - DNA, 13 bp, Artificial Sequence
  Description of Artificial Sequence: Synthetic primer
acggagaatggaa

SEQ ID NO: 6404 - DNA, 13 bp, Artificial Sequence
  Description of Artificial Sequence: Synthetic primer
tacgcctacttcg

SEQ ID NO: 6405 - DNA, 13 bp, Artificial Sequence
  Description of Artificial Sequence: Synthetic primer
cgcttcatgaact

SEQ ID NO: 6406 - DNA, 13 bp, Artificial Sequence
  Description of Artificial Sequence: Synthetic primer
tagttagagtaag

SEQ ID NO: 6407 - DNA, 13 bp, Artificial Sequence
  Description of Artificial Sequence: Synthetic primer
tgcgcggtcagta

SEQ ID NO: 6408 - DNA, 13 bp, Artificial Sequence
  Description of Artificial Sequence: Synthetic primer
cgggtcgaaggtg

SEQ ID NO: 6409 - DNA, 13 bp, Artificial Sequence
  Description of Artificial Sequence: Synthetic primer
tcagctcaccgat

SEQ ID NO: 6410 - DNA, 13 bp, Artificial Sequence
  Description of Artificial Sequence: Synthetic primer
cgtttgtgccata

SEQ ID NO: 6411 - DNA, 13 bp, Artificial Sequence
  Description of Artificial Sequence: Synthetic primer
ttcctttgggtag

SEQ ID NO: 6412 - DNA, 13 bp, Artificial Sequence
  Description of Artificial Sequence: Synthetic primer
cggtgcgcaggaa

SEQ ID NO: 6413 - DNA, 13 bp, Artificial Sequence
  Description of Artificial Sequence: Synthetic primer
gagatagcagaaa

SEQ ID NO: 6414 - DNA, 13 bp, Artificial Sequence
  Description of Artificial Sequence: Synthetic primer
gaaagggtggaga

SEQ ID NO: 6415 - DNA, 13 bp, Artificial Sequence
  Description of Artificial Sequence: Synthetic primer
ggccatcaacgcg

SEQ ID NO: 6416 - DNA, 13 bp, Artificial Sequence
  Description of Artificial Sequence: Synthetic primer
gccacaaccgtca

SEQ ID NO: 6417 - DNA, 13 bp, Artificial Sequence
  Description of Artificial Sequence: Synthetic primer
cgtaggtggcata

SEQ ID NO: 6418 - DNA, 13 bp, Artificial Sequence
  Description of Artificial Sequence: Synthetic primer
atactgagattct

SEQ ID NO: 6419 - DNA, 13 bp, Artificial Sequence
  Description of Artificial Sequence: Synthetic primer
gcgtgagttgctg

SEQ ID NO: 6420 - DNA, 13 bp, Artificial Sequence
  Description of Artificial Sequence: Synthetic primer
aattagaaagctg

SEQ ID NO: 6421 - DNA, 13 bp, Artificial Sequence
  Description of Artificial Sequence: Synthetic primer
aaaggcgcgtttt

SEQ ID NO: 6422 - DNA, 13 bp, Artificial Sequence
  Description of Artificial Sequence: Synthetic primer
tagaaacccgcaa

SEQ ID NO: 6423 - DNA, 13 bp, Artificial Sequence
  Description of Artificial Sequence: Synthetic primer
tgtgctgacgctg

SEQ ID NO: 6424 - DNA, 13 bp, Artificial Sequence
  Description of Artificial Sequence: Synthetic primer
agtttggttgccc

SEQ ID NO: 6425 - DNA, 13 bp, Artificial Sequence
  Description of Artificial Sequence: Synthetic primer
atagatcgaccca

SEQ ID NO: 6426 - DNA, 13 bp, Artificial Sequence
  Description of Artificial Sequence: Synthetic primer
aattgtacctctg

SEQ ID NO: 6427 - DNA, 13 bp, Artificial Sequence
  Description of Artificial Sequence: Synthetic primer
tttcgacaatgca

SEQ ID NO: 6428 - DNA, 13 bp, Artificial Sequence
  Description of Artificial Sequence: Synthetic primer
tgggcgtgttgtt

SEQ ID NO: 6429 - DNA, 13 bp, Artificial Sequence
  Description of Artificial Sequence: Synthetic primer
tgaagctgttatc

SEQ ID NO: 6430 - DNA, 13 bp, Artificial Sequence
  Description of Artificial Sequence: Synthetic primer
ctgcacggcaaaa

SEQ ID NO: 6431 - DNA, 13 bp, Artificial Sequence
  Description of Artificial Sequence: Synthetic primer
ttgaccctggcct

SEQ ID NO: 6432 - DNA, 13 bp, Artificial Sequence
  Description of Artificial Sequence: Synthetic primer
gtcaacatcccca

SEQ ID NO: 6433 - DNA, 13 bp, Artificial Sequence
  Description of Artificial Sequence: Synthetic primer
catgcaccgcgac

SEQ ID NO: 6434 - DNA, 13 bp, Artificial Sequence
  Description of Artificial Sequence: Synthetic primer
agttaaacgggcg

SEQ ID NO: 6435 - DNA, 13 bp, Artificial Sequence
  Description of Artificial Sequence: Synthetic primer
tttgaaccactgt

SEQ ID NO: 6436 - DNA, 13 bp, Artificial Sequence
  Description of Artificial Sequence: Synthetic primer
ctgctcatcaccc

SEQ ID NO: 6437 - DNA, 13 bp, Artificial Sequence
  Description of Artificial Sequence: Synthetic primer
acagttgcagcgt

SEQ ID NO: 6438 - DNA, 13 bp, Artificial Sequence
  Description of Artificial Sequence: Synthetic primer
gaccgtaattatc

SEQ ID NO: 6439 - DNA, 13 bp, Artificial Sequence
  Description of Artificial Sequence: Synthetic primer
tcttcactagttc

SEQ ID NO: 6440 - DNA, 13 bp, Artificial Sequence
  Description of Artificial Sequence: Synthetic primer
tcctcggcaccgt

SEQ ID NO: 6441 - DNA, 13 bp, Artificial Sequence
  Description of Artificial Sequence: Synthetic primer
tggacaggtctcc

SEQ ID NO: 6442 - DNA, 13 bp, Artificial Sequence
  Description of Artificial Sequence: Synthetic primer
tgccattgccata

SEQ ID NO: 6443 - DNA, 13 bp, Artificial Sequence
  Description of Artificial Sequence: Synthetic primer
ctacggcaacatc

SEQ ID NO: 6444 - DNA, 13 bp, Artificial Sequence
  Description of Artificial Sequence: Synthetic primer
accacgatatggg

SEQ ID NO: 6445 - DNA, 13 bp, Artificial Sequence
  Description of Artificial Sequence: Synthetic primer
atattgacggcaa

SEQ ID NO: 6446 - DNA, 13 bp, Artificial Sequence
  Description of Artificial Sequence: Synthetic primer
ttacaacggactg

SEQ ID NO: 6447 - DNA, 13 bp, Artificial Sequence
  Description of Artificial Sequence: Synthetic primer
cagtgataaagaa

SEQ ID NO: 6448 - DNA, 13 bp, Artificial Sequence
  Description of Artificial Sequence: Synthetic primer
cggtacggcgaag

SEQ ID NO: 6449 - DNA, 13 bp, Artificial Sequence
  Description of Artificial Sequence: Synthetic primer
ttccttcttcgcg

SEQ ID NO: 6450 - DNA, 13 bp, Artificial Sequence
  Description of Artificial Sequence: Synthetic primer
taaaagcgaatat

SEQ ID NO: 6451 - DNA, 13 bp, Artificial Sequence
  Description of Artificial Sequence: Synthetic primer
ggatgcgctcggt

SEQ ID NO: 6452 - DNA, 13 bp, Artificial Sequence
  Description of Artificial Sequence: Synthetic primer
gctgccccacttg

SEQ ID NO: 6453 - DNA, 13 bp, Artificial Sequence
  Description of Artificial Sequence: Synthetic primer
aatcgactcaata

SEQ ID NO: 6454 - DNA, 13 bp, Artificial Sequence
  Description of Artificial Sequence: Synthetic primer
acatgccggtaga

SEQ ID NO: 6455 - DNA, 13 bp, Artificial Sequence
  Description of Artificial Sequence: Synthetic primer
acctcccaactgt

SEQ ID NO: 6456 - DNA, 13 bp, Artificial Sequence
  Description of Artificial Sequence: Synthetic primer
agccgctgttcca

SEQ ID NO: 6457 - DNA, 13 bp, Artificial Sequence
  Description of Artificial Sequence: Synthetic primer
acaccacagccca

SEQ ID NO: 6458 - DNA, 13 bp, Artificial Sequence
  Description of Artificial Sequence: Synthetic primer
ggccttgtggaag

SEQ ID NO: 6459 - DNA, 13 bp, Artificial Sequence
  Description of Artificial Sequence: Synthetic primer
cttgttttcggta

SEQ ID NO: 6460 - DNA, 13 bp, Artificial Sequence
  Description of Artificial Sequence: Synthetic primer
tgagtatagcttt

SEQ ID NO: 6461 - DNA, 13 bp, Artificial Sequence
  Description of Artificial Sequence: Synthetic primer
ttcgacgttttga

SEQ ID NO: 6462 - DNA, 13 bp, Artificial Sequence
  Description of Artificial Sequence: Synthetic primer
taagccaatgcca

SEQ ID NO: 6463 - DNA, 13 bp, Artificial Sequence
  Description of Artificial Sequence: Synthetic primer
acgccaaagccga

SEQ ID NO: 6464 - DNA, 13 bp, Artificial Sequence
  Description of Artificial Sequence: Synthetic primer
tctgtaatcaaag

SEQ ID NO: 6465 - DNA, 13 bp, Artificial Sequence
  Description of Artificial Sequence: Synthetic primer
tcggggatattaa

SEQ ID NO: 6466 - DNA, 13 bp, Artificial Sequence
  Description of Artificial Sequence: Synthetic primer
accgccaatacta

SEQ ID NO: 6467 - DNA, 13 bp, Artificial Sequence
  Description of Artificial Sequence: Synthetic primer
agctatatcgaag

SEQ ID NO: 6468 - DNA, 13 bp, Artificial Sequence
  Description of Artificial Sequence: Synthetic primer
tttatcttcttca

SEQ ID NO: 6469 - DNA, 13 bp, Artificial Sequence
  Description of Artificial Sequence: Synthetic primer
aagcgcacctcga

SEQ ID NO: 6470 - DNA, 13 bp, Artificial Sequence
  Description of Artificial Sequence: Synthetic primer
cagctacgagtgg

SEQ ID NO: 6471 - DNA, 13 bp, Artificial Sequence
  Description of Artificial Sequence: Synthetic primer
acagaaagactaa

SEQ ID NO: 6472 - DNA, 13 bp, Artificial Sequence
  Description of Artificial Sequence: Synthetic primer
ggacatgaccaca

SEQ ID NO: 6473 - DNA, 13 bp, Artificial Sequence
  Description of Artificial Sequence: Synthetic primer
ccagtcagctcct

SEQ ID NO: 6474 - DNA, 13 bp, Artificial Sequence
  Description of Artificial Sequence: Synthetic primer
gaagccatcacat

SEQ ID NO: 6475 - DNA, 13 bp, Artificial Sequence
  Description of Artificial Sequence: Synthetic primer
tcaacacccaggg

SEQ ID NO: 6476 - DNA, 13 bp, Artificial Sequence
  Description of Artificial Sequence: Synthetic primer
cctggagcgctac

SEQ ID NO: 6477 - DNA, 13 bp, Artificial Sequence
  Description of Artificial Sequence: Synthetic primer
tcgcggcagtaca

SEQ ID NO: 6478 - DNA, 13 bp, Artificial Sequence
  Description of Artificial Sequence: Synthetic primer
aagaagccggtgc

SEQ ID NO: 6479 - DNA, 13 bp, Artificial Sequence
  Description of Artificial Sequence: Synthetic primer
acgacgggtcatt

SEQ ID NO: 6480 - DNA, 13 bp, Artificial Sequence
  Description of Artificial Sequence: Synthetic primer
acaccttcaacca

SEQ ID NO: 6481 - DNA, 13 bp, Artificial Sequence
  Description of Artificial Sequence: Synthetic primer
gaacttcacgcgc

SEQ ID NO: 6482 - DNA, 13 bp, Artificial Sequence
  Description of Artificial Sequence: Synthetic primer
ttaaaggatattc

SEQ ID NO: 6483 - DNA, 13 bp, Artificial Sequence
  Description of Artificial Sequence: Synthetic primer
gaaggggaattcg

SEQ ID NO: 6484 - DNA, 13 bp, Artificial Sequence
  Description of Artificial Sequence: Synthetic primer
ctgttgcaccgtc

SEQ ID NO: 6485 - DNA, 13 bp, Artificial Sequence
  Description of Artificial Sequence: Synthetic primer
agggcaccatggt

SEQ ID NO: 6486 - DNA, 13 bp, Artificial Sequence
  Description of Artificial Sequence: Synthetic primer
ccaagccgtgttg

SEQ ID NO: 6487 - DNA, 13 bp, Artificial Sequence
  Description of Artificial Sequence: Synthetic primer
ggcggcgttcttc

SEQ ID NO: 6488 - DNA, 13 bp, Artificial Sequence
  Description of Artificial Sequence: Synthetic primer
ttgctaaggctga

SEQ ID NO: 6489 - DNA, 13 bp, Artificial Sequence
  Description of Artificial Sequence: Synthetic primer
accattgacgcgc

SEQ ID NO: 6490 - DNA, 13 bp, Artificial Sequence
  Description of Artificial Sequence: Synthetic primer
aattgaccgcttg

SEQ ID NO: 6491 - DNA, 13 bp, Artificial Sequence
  Description of Artificial Sequence: Synthetic primer
ccagcccgttagg

SEQ ID NO: 6492 - DNA, 13 bp, Artificial Sequence
  Description of Artificial Sequence: Synthetic primer
cgtgttcgcggtg

SEQ ID NO: 6493 - DNA, 13 bp, Artificial Sequence
  Description of Artificial Sequence: Synthetic primer
gagtttccatgcc

SEQ ID NO: 6494 - DNA, 13 bp, Artificial Sequence
  Description of Artificial Sequence: Synthetic primer
tagcaagcgcatc

SEQ ID NO: 6495 - DNA, 13 bp, Artificial Sequence
  Description of Artificial Sequence: Synthetic primer
gaaagatccacta

SEQ ID NO: 6496 - DNA, 13 bp, Artificial Sequence
  Description of Artificial Sequence: Synthetic primer
gcgctttcttgtt

SEQ ID NO: 6497 - DNA, 13 bp, Artificial Sequence
  Description of Artificial Sequence: Synthetic primer
tcgttacggagtt

SEQ ID NO: 6498 - DNA, 13 bp, Artificial Sequence
  Description of Artificial Sequence: Synthetic primer
ctcgccagcaagc

SEQ ID NO: 6499 - DNA, 13 bp, Artificial Sequence
  Description of Artificial Sequence: Synthetic primer
cccaagtaaccag

SEQ ID NO: 6500 - DNA, 13 bp, Artificial Sequence
  Description of Artificial Sequence: Synthetic primer
gcatcacttcttc

SEQ ID NO: 6501 - DNA, 13 bp, Artificial Sequence
  Description of Artificial Sequence: Synthetic primer
tgattgtcttcat

SEQ ID NO: 6502 - DNA, 13 bp, Artificial Sequence
  Description of Artificial Sequence: Synthetic primer
cgaccaatgcggt

SEQ ID NO: 6503 - DNA, 13 bp, Artificial Sequence
  Description of Artificial Sequence: Synthetic primer
gctgaaggatgtg

SEQ ID NO: 6504 - DNA, 13 bp, Artificial Sequence
  Description of Artificial Sequence: Synthetic primer
gaatccaaatttg

SEQ ID NO: 6505 - DNA, 13 bp, Artificial Sequence
  Description of Artificial Sequence: Synthetic primer
tgttcaataagcc

SEQ ID NO: 6506 - DNA, 13 bp, Artificial Sequence
  Description of Artificial Sequence: Synthetic primer
ttcagccacgcgt

SEQ ID NO: 6507 - DNA, 13 bp, Artificial Sequence
  Description of Artificial Sequence: Synthetic primer
gccaaatcctttg

SEQ ID NO: 6508 - DNA, 13 bp, Artificial Sequence
  Description of Artificial Sequence: Synthetic primer
gcgtggtcagcct

SEQ ID NO: 6509 - DNA, 13 bp, Artificial Sequence
  Description of Artificial Sequence: Synthetic primer
tcacgctgaagaa

SEQ ID NO: 6510 - DNA, 13 bp, Artificial Sequence
  Description of Artificial Sequence: Synthetic primer
agtctgtcactcc

SEQ ID NO: 6511 - DNA, 13 bp, Artificial Sequence
  Description of Artificial Sequence: Synthetic primer
aaggcaatgaaat

SEQ ID NO: 6512 - DNA, 13 bp, Artificial Sequence
  Description of Artificial Sequence: Synthetic primer
aacatggcagaaa

SEQ ID NO: 6513 - DNA, 13 bp, Artificial Sequence
  Description of Artificial Sequence: Synthetic primer
atggattatcagc

SEQ ID NO: 6514 - DNA, 13 bp, Artificial Sequence
  Description of Artificial Sequence: Synthetic primer
acggcctctttgg

SEQ ID NO: 6515 - DNA, 13 bp, Artificial Sequence
  Description of Artificial Sequence: Synthetic primer
tgaaagacgtggc

SEQ ID NO: 6516 - DNA, 13 bp, Artificial Sequence
  Description of Artificial Sequence: Synthetic primer
tcatacttcgcgc

SEQ ID NO: 6517 - DNA, 13 bp, Artificial Sequence
  Description of Artificial Sequence: Synthetic primer
gttcgacgttctc

SEQ ID NO: 6518 - DNA, 13 bp, Artificial Sequence
  Description of Artificial Sequence: Synthetic primer
ccacggtgaaacc

SEQ ID NO: 6519 - DNA, 13 bp, Artificial Sequence
  Description of Artificial Sequence: Synthetic primer
attgtcctgttaa

SEQ ID NO: 6520 - DNA, 13 bp, Artificial Sequence
  Description of Artificial Sequence: Synthetic primer
ctcatattcggca

SEQ ID NO: 6521 - DNA, 13 bp, Artificial Sequence
  Description of Artificial Sequence: Synthetic primer
ccgctgttccacc

SEQ ID NO: 6522 - DNA, 13 bp, Artificial Sequence
  Description of Artificial Sequence: Synthetic primer
gagcatcaaatga

SEQ ID NO: 6523 - DNA, 13 bp, Artificial Sequence
  Description of Artificial Sequence: Synthetic primer
cggcaccatttgg

SEQ ID NO: 6524 - DNA, 13 bp, Artificial Sequence
  Description of Artificial Sequence: Synthetic primer
acctatcaggcga

SEQ ID NO: 6525 - DNA, 13 bp, Artificial Sequence
  Description of Artificial Sequence: Synthetic primer
tgaacattccgct

SEQ ID NO: 6526 - DNA, 13 bp, Artificial Sequence
  Description of Artificial Sequence: Synthetic primer
gaacgtcgagcgc

SEQ ID NO: 6527 - DNA, 13 bp, Artificial Sequence
  Description of Artificial Sequence: Synthetic primer
tctgtctgcgagc

SEQ ID NO: 6528 - DNA, 13 bp, Artificial Sequence
  Description of Artificial Sequence: Synthetic primer
ataaaaggtttgt

SEQ ID NO: 6529 - DNA, 13 bp, Artificial Sequence
  Description of Artificial Sequence: Synthetic primer
ccaaccgagtaac

SEQ ID NO: 6530 - DNA, 13 bp, Artificial Sequence
  Description of Artificial Sequence: Synthetic primer
gttccgatggctt

SEQ ID NO: 6531 - DNA, 13 bp, Artificial Sequence
  Description of Artificial Sequence: Synthetic primer
acttgttcttgcg

SEQ ID NO: 6532 - DNA, 13 bp, Artificial Sequence
  Description of Artificial Sequence: Synthetic primer
cgcaagagttcgg

SEQ ID NO: 6533 - DNA, 13 bp, Artificial Sequence
  Description of Artificial Sequence: Synthetic primer
attttccaatcgt

SEQ ID NO: 6534 - DNA, 13 bp, Artificial Sequence
  Description of Artificial Sequence: Synthetic primer
tatttggtacagt

SEQ ID NO: 6535 - DNA, 13 bp, Artificial Sequence
  Description of Artificial Sequence: Synthetic primer
ggctattctccat

SEQ ID NO: 6536 - DNA, 13 bp, Artificial Sequence
  Description of Artificial Sequence: Synthetic primer
gattttggaaaca

SEQ ID NO: 6537 - DNA, 13 bp, Artificial Sequence
  Description of Artificial Sequence: Synthetic primer
tgttgctgtacag

SEQ ID NO: 6538 - DNA, 13 bp, Artificial Sequence
  Description of Artificial Sequence: Synthetic primer
gcatcaaaccgaa

SEQ ID NO: 6539 - DNA, 13 bp, Artificial Sequence
  Description of Artificial Sequence: Synthetic primer
taaaatgtcatgt

SEQ ID NO: 6540 - DNA, 13 bp, Artificial Sequence
  Description of Artificial Sequence: Synthetic primer
tgttacgaaagac

SEQ ID NO: 6541 - DNA, 13 bp, Artificial Sequence
  Description of Artificial Sequence: Synthetic primer
gcggtgatttaca

SEQ ID NO: 6542 - DNA, 13 bp, Artificial Sequence
  Description of Artificial Sequence: Synthetic primer
gctttcatactga

SEQ ID NO: 6543 - DNA, 13 bp, Artificial Sequence
  Description of Artificial Sequence: Synthetic primer
agcagcttctcgc

SEQ ID NO: 6544 - DNA, 13 bp, Artificial Sequence
  Description of Artificial Sequence: Synthetic primer
ggaccagagatcg

SEQ ID NO: 6545 - DNA, 13 bp, Artificial Sequence
  Description of Artificial Sequence: Synthetic primer
ctgcggtcctcca

SEQ ID NO: 6546 - DNA, 13 bp, Artificial Sequence
  Description of Artificial Sequence: Synthetic primer
tatctgcgacaaa

SEQ ID NO: 6547 - DNA, 13 bp, Artificial Sequence
  Description of Artificial Sequence: Synthetic primer
ttacttggcggat

SEQ ID NO: 6548 - DNA, 13 bp, Artificial Sequence
  Description of Artificial Sequence: Synthetic primer
tggatttatcggc

SEQ ID NO: 6549 - DNA, 13 bp, Artificial Sequence
  Description of Artificial Sequence: Synthetic primer
attggtttgctgc

SEQ ID NO: 6550 - DNA, 13 bp, Artificial Sequence
  Description of Artificial Sequence: Synthetic primer
ttctgaccattgc

SEQ ID NO: 6551 - DNA, 13 bp, Artificial Sequence
  Description of Artificial Sequence: Synthetic primer
ctacattttgtcc

SEQ ID NO: 6552 - DNA, 13 bp, Artificial Sequence
  Description of Artificial Sequence: Synthetic primer
ggtaagcaggcgc

SEQ ID NO: 6553 - DNA, 13 bp, Artificial Sequence
  Description of Artificial Sequence: Synthetic primer
tgcagaatgtcgt

SEQ ID NO: 6554 - DNA, 13 bp, Artificial Sequence
  Description of Artificial Sequence: Synthetic primer
aacaatttcccca

SEQ ID NO: 6555 - DNA, 13 bp, Artificial Sequence
  Description of Artificial Sequence: Synthetic primer
caaggccagtgac

SEQ ID NO: 6556 - DNA, 13 bp, Artificial Sequence
  Description of Artificial Sequence: Synthetic primer
cattcattttcct

SEQ ID NO: 6557 - DNA, 13 bp, Artificial Sequence
  Description of Artificial Sequence: Synthetic primer
tcaagcattttat

SEQ ID NO: 6558 - DNA, 13 bp, Artificial Sequence
  Description of Artificial Sequence: Synthetic primer
ggagcaaagggaa

SEQ ID NO: 6559 - DNA, 13 bp, Artificial Sequence
  Description of Artificial Sequence: Synthetic primer
ctaatactggtgt

SEQ ID NO: 6560 - DNA, 13 bp, Artificial Sequence
  Description of Artificial Sequence: Synthetic primer
atcgcaggccgat

SEQ ID NO: 6561 - DNA, 13 bp, Artificial Sequence
  Description of Artificial Sequence: Synthetic primer
ttcagcgagaaac

SEQ ID NO: 6562 - DNA, 13 bp, Artificial Sequence
  Description of Artificial Sequence: Synthetic primer
gaatcgtaaatat

SEQ ID NO: 6563 - DNA, 13 bp, Artificial Sequence
  Description of Artificial Sequence: Synthetic primer
tttaccgtgtcac

SEQ ID NO: 6564 - DNA, 13 bp, Artificial Sequence
  Description of Artificial Sequence: Synthetic primer
gatcaacggcgtc

SEQ ID NO: 6565 - DNA, 13 bp, Artificial Sequence
  Description of Artificial Sequence: Synthetic primer
cacaggcctgctg

SEQ ID NO: 6566 - DNA, 13 bp, Artificial Sequence
  Description of Artificial Sequence: Synthetic primer
tattatcacgtgt

SEQ ID NO: 6567 - DNA, 13 bp, Artificial Sequence
  Description of Artificial Sequence: Synthetic primer
ggtagcaggctta

SEQ ID NO: 6568 - DNA, 13 bp, Artificial Sequence
  Description of Artificial Sequence: Synthetic primer
tgcgacgatcgga

SEQ ID NO: 6569 - DNA, 13 bp, Artificial Sequence
  Description of Artificial Sequence: Synthetic primer
atctcctatctgg

SEQ ID NO: 6570 - DNA, 13 bp, Artificial Sequence
  Description of Artificial Sequence: Synthetic primer
atagcgggcattg

SEQ ID NO: 6571 - DNA, 13 bp, Artificial Sequence
  Description of Artificial Sequence: Synthetic primer
ttgccagcactga

SEQ ID NO: 6572 - DNA, 13 bp, Artificial Sequence
  Description of Artificial Sequence: Synthetic primer
atgccattgcaaa

SEQ ID NO: 6573 - DNA, 13 bp, Artificial Sequence
  Description of Artificial Sequence: Synthetic primer
tgtctcacggatc

SEQ ID NO: 6574 - DNA, 13 bp, Artificial Sequence
  Description of Artificial Sequence: Synthetic primer
cccatcggaccct

SEQ ID NO: 6575 - DNA, 13 bp, Artificial Sequence
  Description of Artificial Sequence: Synthetic primer
gcgttaaggtttc

SEQ ID NO: 6576 - DNA, 13 bp, Artificial Sequence
  Description of Artificial Sequence: Synthetic primer
caatacgtgatgc

SEQ ID NO: 6577 - DNA, 13 bp, Artificial Sequence
  Description of Artificial Sequence: Synthetic primer
ctctgtcgtcact

SEQ ID NO: 6578 - DNA, 13 bp, Artificial Sequence
  Description of Artificial Sequence: Synthetic primer
gataggcatcgtt

SEQ ID NO: 6579 - DNA, 13 bp, Artificial Sequence
  Description of Artificial Sequence: Synthetic primer
ttcatatctcttc

SEQ ID NO: 6580 - DNA, 13 bp, Artificial Sequence
  Description of Artificial Sequence: Synthetic primer
atcaaacaggtgg

SEQ ID NO: 6581 - DNA, 13 bp, Artificial Sequence
  Description of Artificial Sequence: Synthetic primer
ggacgtggttccc

SEQ ID NO: 6582 - DNA, 13 bp, Artificial Sequence
  Description of Artificial Sequence: Synthetic primer
atttacttagtga

SEQ ID NO: 6583 - DNA, 13 bp, Artificial Sequence
  Description of Artificial Sequence: Synthetic primer
aggtcaaaagcct

SEQ ID NO: 6584 - DNA, 13 bp, Artificial Sequence
  Description of Artificial Sequence: Synthetic primer
gggcaaagagatg

SEQ ID NO: 6585 - DNA, 13 bp, Artificial Sequence
  Description of Artificial Sequence: Synthetic primer
gcctatccacgct

SEQ ID NO: 6586 - DNA, 13 bp, Artificial Sequence
  Description of Artificial Sequence: Synthetic primer
tcgggcttgtgtg

SEQ ID NO: 6587 - DNA, 13 bp, Artificial Sequence
  Description of Artificial Sequence: Synthetic primer
taaatacggtttc

SEQ ID NO: 6588 - DNA, 13 bp, Artificial Sequence
  Description of Artificial Sequence: Synthetic primer
gctcatggagcag

SEQ ID NO: 6589 - DNA, 13 bp, Artificial Sequence
  Description of Artificial Sequence: Synthetic primer
ccggtgaccagca

SEQ ID NO: 6590 - DNA, 13 bp, Artificial Sequence
  Description of Artificial Sequence: Synthetic primer
gtgccttgtcgct

SEQ ID NO: 6591 - DNA, 13 bp, Artificial Sequence
  Description of Artificial Sequence: Synthetic primer
gtcgcaggtgatc

SEQ ID NO: 6592 - DNA, 13 bp, Artificial Sequence
  Description of Artificial Sequence: Synthetic primer
tgctgctggtgga

SEQ ID NO: 6593 - DNA, 13 bp, Artificial Sequence
  Description of Artificial Sequence: Synthetic primer
tttaacgccaatg

SEQ ID NO: 6594 - DNA, 13 bp, Artificial Sequence
  Description of Artificial Sequence: Synthetic primer
ggatatagagaaa

SEQ ID NO: 6595 - DNA, 13 bp, Artificial Sequence
  Description of Artificial Sequence: Synthetic primer
ggttaccctgatc

SEQ ID NO: 6596 - DNA, 13 bp, Artificial Sequence
  Description of Artificial Sequence: Synthetic primer
ttggcacagagga

SEQ ID NO: 6597 - DNA, 13 bp, Artificial Sequence
  Description of Artificial Sequence: Synthetic primer
tttgcgggtcaag

SEQ ID NO: 6598 - DNA, 13 bp, Artificial Sequence
  Description of Artificial Sequence: Synthetic primer
ccattctaagtat

SEQ ID NO: 6599 - DNA, 13 bp, Artificial Sequence
  Description of Artificial Sequence: Synthetic primer
tcccatacagttt

SEQ ID NO: 6600 - DNA, 13 bp, Artificial Sequence
  Description of Artificial Sequence: Synthetic primer
cagcgctacctat

SEQ ID NO: 6601 - DNA, 13 bp, Artificial Sequence
  Description of Artificial Sequence: Synthetic primer
atgcctaatttct

SEQ ID NO: 6602 - DNA, 13 bp, Artificial Sequence
  Description of Artificial Sequence: Synthetic primer
taaagtgctaata

SEQ ID NO: 6603 - DNA, 13 bp, Artificial Sequence
  Description of Artificial Sequence: Synthetic primer
ctccgctttatct

SEQ ID NO: 6604 - DNA, 13 bp, Artificial Sequence
  Description of Artificial Sequence: Synthetic primer
gtgaaacggtaag

SEQ ID NO: 6605 - DNA, 13 bp, Artificial Sequence
  Description of Artificial Sequence: Synthetic primer
ccgccgtattcgt

SEQ ID NO: 6606 - DNA, 13 bp, Artificial Sequence
  Description of Artificial Sequence: Synthetic primer
atttcaaagagcg

SEQ ID NO: 6607 - DNA, 13 bp, Artificial Sequence
  Description of Artificial Sequence: Synthetic primer
ttagcggcagcat

SEQ ID NO: 6608 - DNA, 13 bp, Artificial Sequence
  Description of Artificial Sequence: Synthetic primer
cgttgacgcagcg

SEQ ID NO: 6609 - DNA, 13 bp, Artificial Sequence
  Description of Artificial Sequence: Synthetic primer
ggctcgctgtatg

SEQ ID NO: 6610 - DNA, 13 bp, Artificial Sequence
  Description of Artificial Sequence: Synthetic primer
tacatcctgtaat

SEQ ID NO: 6611 - DNA, 13 bp, Artificial Sequence
  Description of Artificial Sequence: Synthetic primer
cattgatggctgc

SEQ ID NO: 6612 - DNA, 13 bp, Artificial Sequence
  Description of Artificial Sequence: Synthetic primer
gcaacaaattcgt

SEQ ID NO: 6613 - DNA, 13 bp, Artificial Sequence
  Description of Artificial Sequence: Synthetic primer
tatagaatggaca

SEQ ID NO: 6614 - DNA, 13 bp, Artificial Sequence
  Description of Artificial Sequence: Synthetic primer
ttgatgctgctta

SEQ ID NO: 6615 - DNA, 13 bp, Artificial Sequence
  Description of Artificial Sequence: Synthetic primer
cagttaattggaa

SEQ ID NO: 6616 - DNA, 13 bp, Artificial Sequence
  Description of Artificial Sequence: Synthetic primer
ctgggcgagatcg

SEQ ID NO: 6617 - DNA, 13 bp, Artificial Sequence
  Description of Artificial Sequence: Synthetic primer
ttcttcatgaaat

SEQ ID NO: 6618 - DNA, 13 bp, Artificial Sequence
  Description of Artificial Sequence: Synthetic primer
ctggcgtcctgct

SEQ ID NO: 6619 - DNA, 13 bp, Artificial Sequence
  Description of Artificial Sequence: Synthetic primer
tattatcggtgaa

SEQ ID NO: 6620 - DNA, 13 bp, Artificial Sequence
  Description of Artificial Sequence: Synthetic primer
aaagcaaaacaag

SEQ ID NO: 6621 - DNA, 13 bp, Artificial Sequence
  Description of Artificial Sequence: Synthetic primer
agaacttgtgctg

SEQ ID NO: 6622 - DNA, 13 bp, Artificial Sequence
  Description of Artificial Sequence: Synthetic primer
tcagtatgattta

SEQ ID NO: 6623 - DNA, 13 bp, Artificial Sequence
  Description of Artificial Sequence: Synthetic primer
cccctgatgcgac

SEQ ID NO: 6624 - DNA, 13 bp, Artificial Sequence
  Description of Artificial Sequence: Synthetic primer
agcgacattggaa

SEQ ID NO: 6625 - DNA, 13 bp, Artificial Sequence
  Description of Artificial Sequence: Synthetic primer
gtacctataacca

SEQ ID NO: 6626 - DNA, 13 bp, Artificial Sequence
  Description of Artificial Sequence: Synthetic primer
agacagattgcca

SEQ ID NO: 6627 - DNA, 13 bp, Artificial Sequence
  Description of Artificial Sequence: Synthetic primer
gcgcatctggtca

SEQ ID NO: 6628 - DNA, 13 bp, Artificial Sequence
  Description of Artificial Sequence: Synthetic primer
ttgaatattccac

SEQ ID NO: 6629 - DNA, 13 bp, Artificial Sequence
  Description of Artificial Sequence: Synthetic primer
tgtgagctccaag

SEQ ID NO: 6630 - DNA, 13 bp, Artificial Sequence
  Description of Artificial Sequence: Synthetic primer
tacaatgtctcga

SEQ ID NO: 6631 - DNA, 13 bp, Artificial Sequence
  Description of Artificial Sequence: Synthetic primer
aggaggatatttc

SEQ ID NO: 6632 - DNA, 13 bp, Artificial Sequence
  Description of Artificial Sequence: Synthetic primer
gtgtgtaggaact

SEQ ID NO: 6633 - DNA, 13 bp, Artificial Sequence
  Description of Artificial Sequence: Synthetic primer
ggaagagaaactc

SEQ ID NO: 6634 - DNA, 13 bp, Artificial Sequence
  Description of Artificial Sequence: Synthetic primer
ctgaatctgatcc

SEQ ID NO: 6635 - DNA, 13 bp, Artificial Sequence
  Description of Artificial Sequence: Synthetic primer
atgagcgcgatcg

SEQ ID NO: 6636 - DNA, 13 bp, Artificial Sequence
  Description of Artificial Sequence: Synthetic primer
cgcatcgccaatg

SEQ ID NO: 6637 - DNA, 13 bp, Artificial Sequence
  Description of Artificial Sequence: Synthetic primer
aggatcttttccg

SEQ ID NO: 6638 - DNA, 13 bp, Artificial Sequence
  Description of Artificial Sequence: Synthetic primer
cctgctgatcgcc

SEQ ID NO: 6639 - DNA, 13 bp, Artificial Sequence
  Description of Artificial Sequence: Synthetic primer
tttaatgctgttt

SEQ ID NO: 6640 - DNA, 13 bp, Artificial Sequence
  Description of Artificial Sequence: Synthetic primer
gcagctttggatg

SEQ ID NO: 6641 - DNA, 13 bp, Artificial Sequence
  Description of Artificial Sequence: Synthetic primer
gcggaatggtcaa

SEQ ID NO: 6642 - DNA, 13 bp, Artificial Sequence
  Description of Artificial Sequence: Synthetic primer
gcggtggcctatg

SEQ ID NO: 6643 - DNA, 13 bp, Artificial Sequence
  Description of Artificial Sequence: Synthetic primer
ttcaaaacaagaa

SEQ ID NO: 6644 - DNA, 13 bp, Artificial Sequence
  Description of Artificial Sequence: Synthetic primer
gccagcgactgct

SEQ ID NO: 6645 - DNA, 13 bp, Artificial Sequence
  Description of Artificial Sequence: Synthetic primer
atccattggtcgt

SEQ ID NO: 6646 - DNA, 13 bp, Artificial Sequence
  Description of Artificial Sequence: Synthetic primer
ctggcaggaggaa

SEQ ID NO: 6647 - DNA, 13 bp, Artificial Sequence
  Description of Artificial Sequence: Synthetic primer
gctttgtgtttta

SEQ ID NO: 6648 - DNA, 13 bp, Artificial Sequence
  Description of Artificial Sequence: Synthetic primer
tgggtacgattct

SEQ ID NO: 6649 - DNA, 13 bp, Artificial Sequence
  Description of Artificial Sequence: Synthetic primer
tctgctggtatgg

SEQ ID NO: 6650 - DNA, 13 bp, Artificial Sequence
  Description of Artificial Sequence: Synthetic primer
taggtgtttctaa

SEQ ID NO: 6651 - DNA, 13 bp, Artificial Sequence
  Description of Artificial Sequence: Synthetic primer
cattgctcaatga

SEQ ID NO: 6652 - DNA, 13 bp, Artificial Sequence
  Description of Artificial Sequence: Synthetic primer
aacggaggcaatt

SEQ ID NO: 6653 - DNA, 13 bp, Artificial Sequence
  Description of Artificial Sequence: Synthetic primer
taagggcgatctg

SEQ ID NO: 6654 - DNA, 13 bp, Artificial Sequence
  Description of Artificial Sequence: Synthetic primer
tcggtttcctcac

SEQ ID NO: 6655 - DNA, 13 bp, Artificial Sequence
  Description of Artificial Sequence: Synthetic primer
tcatctggttaag

SEQ ID NO: 6656 - DNA, 13 bp, Artificial Sequence
  Description of Artificial Sequence: Synthetic primer
atccaaatatctg

SEQ ID NO: 6657 - DNA, 13 bp, Artificial Sequence
  Description of Artificial Sequence: Synthetic primer
tgaaaattggatg

SEQ ID NO: 6658 - DNA, 13 bp, Artificial Sequence
  Description of Artificial Sequence: Synthetic primer
gcagaacataccg

SEQ ID NO: 6659 - DNA, 13 bp, Artificial Sequence
  Description of Artificial Sequence: Synthetic primer
accgctacgacat

SEQ ID NO: 6660 - DNA, 13 bp, Artificial Sequence
  Description of Artificial Sequence: Synthetic primer
agccagaggcgca

SEQ ID NO: 6661 - DNA, 13 bp, Artificial Sequence
  Description of Artificial Sequence: Synthetic primer
cgggccagttcta

SEQ ID NO: 6662 - DNA, 13 bp, Artificial Sequence
  Description of Artificial Sequence: Synthetic primer
tgataccggatgt

SEQ ID NO: 6663 - DNA, 13 bp, Artificial Sequence
  Description of Artificial Sequence: Synthetic primer
ggaacgaaacgac

SEQ ID NO: 6664 - DNA, 13 bp, Artificial Sequence
  Description of Artificial Sequence: Synthetic primer
tcgttgggcacgt

SEQ ID NO: 6665 - DNA, 13 bp, Artificial Sequence
  Description of Artificial Sequence: Synthetic primer
tcagggaaacctt

SEQ ID NO: 6666 - DNA, 13 bp, Artificial Sequence
  Description of Artificial Sequence: Synthetic primer
ggcccagctgaaa

SEQ ID NO: 6667 - DNA, 13 bp, Artificial Sequence
  Description of Artificial Sequence: Synthetic primer
tcagtacgcattt

SEQ ID NO: 6668 - DNA, 13 bp, Artificial Sequence
  Description of Artificial Sequence: Synthetic primer
caacacgaacggc

SEQ ID NO: 6669 - DNA, 13 bp, Artificial Sequence
  Description of Artificial Sequence: Synthetic primer
agcctgtcttctg

SEQ ID NO: 6670 - DNA, 13 bp, Artificial Sequence
  Description of Artificial Sequence: Synthetic primer
ctgaatagcctaa

SEQ ID NO: 6671 - DNA, 13 bp, Artificial Sequence
  Description of Artificial Sequence: Synthetic primer
ttcccggccgaga

SEQ ID NO: 6672 - DNA, 13 bp, Artificial Sequence
  Description of Artificial Sequence: Synthetic primer
caccatcgcaaat

SEQ ID NO: 6673 - DNA, 13 bp, Artificial Sequence
  Description of Artificial Sequence: Synthetic primer
atgtctcccaccg

SEQ ID NO: 6674 - DNA, 13 bp, Artificial Sequence
  Description of Artificial Sequence: Synthetic primer
caggtgaggccgt

SEQ ID NO: 6675 - DNA, 13 bp, Artificial Sequence
  Description of Artificial Sequence: Synthetic primer
gtatgcaggccag

SEQ ID NO: 6676 - DNA, 13 bp, Artificial Sequence
  Description of Artificial Sequence: Synthetic primer
agaaagagcaacg

SEQ ID NO: 6677 - DNA, 13 bp, Artificial Sequence
  Description of Artificial Sequence: Synthetic primer
tcaaaagaaagaa

SEQ ID NO: 6678 - DNA, 13 bp, Artificial Sequence
  Description of Artificial Sequence: Synthetic primer
tacagaggtgtaa

SEQ ID NO: 6679 - DNA, 13 bp, Artificial Sequence
  Description of Artificial Sequence: Synthetic primer
tcagccattccac

SEQ ID NO: 6680 - DNA, 13 bp, Artificial Sequence
  Description of Artificial Sequence: Synthetic primer
ccctgtgcctaaa

SEQ ID NO: 6681 - DNA, 13 bp, Artificial Sequence
  Description of Artificial Sequence: Synthetic primer
gacgggatctatc

SEQ ID NO: 6682 - DNA, 13 bp, Artificial Sequence
  Description of Artificial Sequence: Synthetic primer
attatttgaagga

SEQ ID NO: 6683 - DNA, 13 bp, Artificial Sequence
  Description of Artificial Sequence: Synthetic primer
tggtgataacaac

SEQ ID NO: 6684 - DNA, 13 bp, Artificial Sequence
  Description of Artificial Sequence: Synthetic primer
acaccacatcaac

SEQ ID NO: 6685 - DNA, 13 bp, Artificial Sequence
  Description of Artificial Sequence: Synthetic primer
tcccgccttttgg

SEQ ID NO: 6686 - DNA, 13 bp, Artificial Sequence
  Description of Artificial Sequence: Synthetic primer
ggccgtcagtagt

SEQ ID NO: 6687 - DNA, 13 bp, Artificial Sequence
  Description of Artificial Sequence: Synthetic primer
gatgaagaagacg

SEQ ID NO: 6688 - DNA, 13 bp, Artificial Sequence
  Description of Artificial Sequence: Synthetic primer
acgcatccattct

SEQ ID NO: 6689 - DNA, 13 bp, Artificial Sequence
  Description of Artificial Sequence: Synthetic primer
cgtactcgcaccg

SEQ ID NO: 6690 - DNA, 13 bp, Artificial Sequence
  Description of Artificial Sequence: Synthetic primer
cagcggcaccttg

SEQ ID NO: 6691 - DNA, 13 bp, Artificial Sequence
  Description of Artificial Sequence: Synthetic primer
atatagcttccaa

SEQ ID NO: 6692 - DNA, 13 bp, Artificial Sequence
  Description of Artificial Sequence: Synthetic primer
gatgcgcgtatag

SEQ ID NO: 6693 - DNA, 13 bp, Artificial Sequence
  Description of Artificial Sequence: Synthetic primer
gggtttcggtgac

SEQ ID NO: 6694 - DNA, 13 bp, Artificial Sequence
  Description of Artificial Sequence: Synthetic primer
ctcatcgcagtat

SEQ ID NO: 6695 - DNA, 13 bp, Artificial Sequence
  Description of Artificial Sequence: Synthetic primer
ctgatcgccgcac

SEQ ID NO: 6696 - DNA, 13 bp, Artificial Sequence
  Description of Artificial Sequence: Synthetic primer
tcggggtgcacga

SEQ ID NO: 6697 - DNA, 13 bp, Artificial Sequence
  Description of Artificial Sequence: Synthetic primer
ggtgtggaaggca

SEQ ID NO: 6698 - DNA, 13 bp, Artificial Sequence
  Description of Artificial Sequence: Synthetic primer
cgattcgctgtat

SEQ ID NO: 6699 - DNA, 13 bp, Artificial Sequence
  Description of Artificial Sequence: Synthetic primer
gtatattgggtta

SEQ ID NO: 6700 - DNA, 13 bp, Artificial Sequence
  Description of Artificial Sequence: Synthetic primer
gcggcattggtcg

SEQ ID NO: 6701 - DNA, 13 bp, Artificial Sequence
  Description of Artificial Sequence: Synthetic primer
aggaacgaaaact

SEQ ID NO: 6702 - DNA, 13 bp, Artificial Sequence
  Description of Artificial Sequence: Synthetic primer
gcaccacaatcgc

SEQ ID NO: 6703 - DNA, 13 bp, Artificial Sequence
  Description of Artificial Sequence: Synthetic primer
ggtattgttgagg

SEQ ID NO: 6704 - DNA, 13 bp, Artificial Sequence
  Description of Artificial Sequence: Synthetic primer
tttagccagtata

SEQ ID NO: 6705 - DNA, 13 bp, Artificial Sequence
  Description of Artificial Sequence: Synthetic primer
ctgataccccatg

SEQ ID NO: 6706 - DNA, 13 bp, Artificial Sequence
  Description of Artificial Sequence: Synthetic primer
agacgttgcagga

SEQ ID NO: 6707 - DNA, 13 bp, Artificial Sequence
  Description of Artificial Sequence: Synthetic primer
aattggaagagaa

SEQ ID NO: 6708 - DNA, 13 bp, Artificial Sequence
  Description of Artificial Sequence: Synthetic primer
acaaaacgccgcc

SEQ ID NO: 6709 - DNA, 13 bp, Artificial Sequence
  Description of Artificial Sequence: Synthetic primer
cgccgttggcatt

SEQ ID NO: 6710 - DNA, 13 bp, Artificial Sequence
  Description of Artificial Sequence: Synthetic primer
tcttgctcgaggc

SEQ ID NO: 6711 - DNA, 13 bp, Artificial Sequence
  Description of Artificial Sequence: Synthetic primer
tggccagcgcatc

SEQ ID NO: 6712 - DNA, 13 bp, Artificial Sequence
  Description of Artificial Sequence: Synthetic primer
ggcgatggaacag

SEQ ID NO: 6713 - DNA, 13 bp, Artificial Sequence
  Description of Artificial Sequence: Synthetic primer
gtagcaaagtgaa

SEQ ID NO: 6714 - DNA, 13 bp, Artificial Sequence
  Description of Artificial Sequence: Synthetic primer
tcgattcggtgct

SEQ ID NO: 6715 - DNA, 13 bp, Artificial Sequence
  Description of Artificial Sequence: Synthetic primer
ttagtaagacgtt

SEQ ID NO: 6716 - DNA, 13 bp, Artificial Sequence
  Description of Artificial Sequence: Synthetic primer
ctcgctggacacg

SEQ ID NO: 6717 - DNA, 13 bp, Artificial Sequence
  Description of Artificial Sequence: Synthetic primer
gcttatttgctct

SEQ ID NO: 6718 - DNA, 13 bp, Artificial Sequence
  Description of Artificial Sequence: Synthetic primer
catctctgtaata

SEQ ID NO: 6719 - DNA, 13 bp, Artificial Sequence
  Description of Artificial Sequence: Synthetic primer
gggaatggatttt

SEQ ID NO: 6720 - DNA, 13 bp, Artificial Sequence
  Description of Artificial Sequence: Synthetic primer
cagaccgtggaaa

SEQ ID NO: 6721 - DNA, 13 bp, Artificial Sequence
  Description of Artificial Sequence: Synthetic primer
caatctgtgcagt

SEQ ID NO: 6722 - DNA, 13 bp, Artificial Sequence
  Description of Artificial Sequence: Synthetic primer
cattattttgatg

SEQ ID NO: 6723 - DNA, 13 bp, Artificial Sequence
  Description of Artificial Sequence: Synthetic primer
gaaatctggccac

SEQ ID NO: 6724 - DNA, 13 bp, Artificial Sequence
  Description of Artificial Sequence: Synthetic primer
tacgacacagcgc

SEQ ID NO: 6725 - DNA, 13 bp, Artificial Sequence
  Description of Artificial Sequence: Synthetic primer
cctaatgtgcttg

SEQ ID NO: 6726 - DNA, 13 bp, Artificial Sequence
  Description of Artificial Sequence: Synthetic primer
tcattccgaatgg

SEQ ID NO: 6727 - DNA, 13 bp, Artificial Sequence
  Description of Artificial Sequence: Synthetic primer
ggcctgttcgcga

SEQ ID NO: 6728 - DNA, 13 bp, Artificial Sequence
  Description of Artificial Sequence: Synthetic primer
ccaatcatcgtta

SEQ ID NO: 6729 - DNA, 13 bp, Artificial Sequence
  Description of Artificial Sequence: Synthetic primer
gccaatgaaaccg

SEQ ID NO: 6730 - DNA, 13 bp, Artificial Sequence
  Description of Artificial Sequence: Synthetic primer
gaatagtgataaa

SEQ ID NO: 6731 - DNA, 13 bp, Artificial Sequence
  Description of Artificial Sequence: Synthetic primer
ggatccatccaaa

SEQ ID NO: 6732 - DNA, 13 bp, Artificial Sequence
  Description of Artificial Sequence: Synthetic primer
gctggtggaagcg

SEQ ID NO: 6733 - DNA, 13 bp, Artificial Sequence
  Description of Artificial Sequence: Synthetic primer
tatccgcttcgac

SEQ ID NO: 6734 - DNA, 13 bp, Artificial Sequence
  Description of Artificial Sequence: Synthetic primer
tttatcacactgc

SEQ ID NO: 6735 - DNA, 13 bp, Artificial Sequence
  Description of Artificial Sequence: Synthetic primer
accatttgtttgg

SEQ ID NO: 6736 - DNA, 13 bp, Artificial Sequence
  Description of Artificial Sequence: Synthetic primer
gatactgctcgtg

SEQ ID NO: 6737 - DNA, 13 bp, Artificial Sequence
  Description of Artificial Sequence: Synthetic primer
ccatcattctcac

SEQ ID NO: 6738 - DNA, 13 bp, Artificial Sequence
  Description of Artificial Sequence: Synthetic primer
ttgctgatgaaaa

SEQ ID NO: 6739 - DNA, 13 bp, Artificial Sequence
  Description of Artificial Sequence: Synthetic primer
gtgaaaccctcag

SEQ ID NO: 6740 - DNA, 13 bp, Artificial Sequence
  Description of Artificial Sequence: Synthetic primer
tcatagtggaacc

SEQ ID NO: 6741 - DNA, 13 bp, Artificial Sequence
  Description of Artificial Sequence: Synthetic primer
gcgaggatcggta

SEQ ID NO: 6742 - DNA, 13 bp, Artificial Sequence
  Description of Artificial Sequence: Synthetic primer
gacgcctcgtcct

SEQ ID NO: 6743 - DNA, 13 bp, Artificial Sequence
  Description of Artificial Sequence: Synthetic primer
gagaggcggtttg

SEQ ID NO: 6744 - DNA, 13 bp, Artificial Sequence
  Description of Artificial Sequence: Synthetic primer
aatacccggaagt

SEQ ID NO: 6745 - DNA, 13 bp, Artificial Sequence
  Description of Artificial Sequence: Synthetic primer
tgcaattcttgaa

SEQ ID NO: 6746 - DNA, 13 bp, Artificial Sequence
  Description of Artificial Sequence: Synthetic primer
aattcgcggcgta

SEQ ID NO: 6747 - DNA, 13 bp, Artificial Sequence
  Description of Artificial Sequence: Synthetic primer
atttcatgtgtgg

SEQ ID NO: 6748 - DNA, 13 bp, Artificial Sequence
  Description of Artificial Sequence: Synthetic primer
aaacaatcctgca

SEQ ID NO: 6749 - DNA, 13 bp, Artificial Sequence
  Description of Artificial Sequence: Synthetic primer
tactgcacccaaa

SEQ ID NO: 6750 - DNA, 13 bp, Artificial Sequence
  Description of Artificial Sequence: Synthetic primer
acagcggcatcgt

SEQ ID NO: 6751 - DNA, 13 bp, Artificial Sequence
  Description of Artificial Sequence: Synthetic primer
gaataaacccgct

SEQ ID NO: 6752 - DNA, 13 bp, Artificial Sequence
  Description of Artificial Sequence: Synthetic primer
gcagttctcaaca

SEQ ID NO: 6753 - DNA, 13 bp, Artificial Sequence
  Description of Artificial Sequence: Synthetic primer
caggtaacgcata

SEQ ID NO: 6754 - DNA, 13 bp, Artificial Sequence
  Description of Artificial Sequence: Synthetic primer
gcagaatgttttc

SEQ ID NO: 6755 - DNA, 13 bp, Artificial Sequence
  Description of Artificial Sequence: Synthetic primer
cgggcattgatga

SEQ ID NO: 6756 - DNA, 13 bp, Artificial Sequence
  Description of Artificial Sequence: Synthetic primer
gctgttggtatca

SEQ ID NO: 6757 - DNA, 13 bp, Artificial Sequence
  Description of Artificial Sequence: Synthetic primer
acgctgtttggca

SEQ ID NO: 6758 - DNA, 13 bp, Artificial Sequence
  Description of Artificial Sequence: Synthetic primer
gactgcgtcacgt

SEQ ID NO: 6759 - DNA, 13 bp, Artificial Sequence
  Description of Artificial Sequence: Synthetic primer
atgatgactctgg

SEQ ID NO: 6760 - DNA, 13 bp, Artificial Sequence
  Description of Artificial Sequence: Synthetic primer
gcaaaagcagtcg

SEQ ID NO: 6761 - DNA, 13 bp, Artificial Sequence
  Description of Artificial Sequence: Synthetic primer
ccctgttagccac

SEQ ID NO: 6762 - DNA, 13 bp, Artificial Sequence
  Description of Artificial Sequence: Synthetic primer
cttgtcgaggatg

SEQ ID NO: 6763 - DNA, 13 bp, Artificial Sequence
  Description of Artificial Sequence: Synthetic primer
aggtaaaaccaat

SEQ ID NO: 6764 - DNA, 13 bp, Artificial Sequence
  Description of Artificial Sequence: Synthetic primer
ctgtcgatcgcgc

SEQ ID NO: 6765 - DNA, 13 bp, Artificial Sequence
  Description of Artificial Sequence: Synthetic primer
aattcttttcgta

SEQ ID NO: 6766 - DNA, 13 bp, Artificial Sequence
  Description of Artificial Sequence: Synthetic primer
cctctttagaagg

SEQ ID NO: 6767 - DNA, 13 bp, Artificial Sequence
  Description of Artificial Sequence: Synthetic primer
tcggtcctcgcaa

SEQ ID NO: 6768 - DNA, 13 bp, Artificial Sequence
  Description of Artificial Sequence: Synthetic primer
cgaaggtcagtgc

SEQ ID NO: 6769 - DNA, 13 bp, Artificial Sequence
  Description of Artificial Sequence: Synthetic primer
cagttgatcgcaa

SEQ ID NO: 6770 - DNA, 13 bp, Artificial Sequence
  Description of Artificial Sequence: Synthetic primer
gcggctcttcagc

SEQ ID NO: 6771 - DNA, 13 bp, Artificial Sequence
  Description of Artificial Sequence: Synthetic primer
gcgacgcagggta

SEQ ID NO: 6772 - DNA, 13 bp, Artificial Sequence
  Description of Artificial Sequence: Synthetic primer
gcagttccttcga

SEQ ID NO: 6773 - DNA, 13 bp, Artificial Sequence
  Description of Artificial Sequence: Synthetic primer
ccatttgcgataa

SEQ ID NO: 6774 - DNA, 13 bp, Artificial Sequence
  Description of Artificial Sequence: Synthetic primer
tttaccagaattg

SEQ ID NO: 6775 - DNA, 13 bp, Artificial Sequence
  Description of Artificial Sequence: Synthetic primer
cagcagatagcag

SEQ ID NO: 6776 - DNA, 13 bp, Artificial Sequence
  Description of Artificial Sequence: Synthetic primer
tcgtcggtctcgg

SEQ ID NO: 6777 - DNA, 13 bp, Artificial Sequence
  Description of Artificial Sequence: Synthetic primer
tttcatgatcagt

SEQ ID NO: 6778 - DNA, 13 bp, Artificial Sequence
  Description of Artificial Sequence: Synthetic primer
ttgaggcaaattc

SEQ ID NO: 6779 - DNA, 13 bp, Artificial Sequence
  Description of Artificial Sequence: Synthetic primer
gtctttattcgta

SEQ ID NO: 6780 - DNA, 13 bp, Artificial Sequence
  Description of Artificial Sequence: Synthetic primer
agctcgacctata

SEQ ID NO: 6781 - DNA, 13 bp, Artificial Sequence
  Description of Artificial Sequence: Synthetic primer
tgcatgtcctgct

SEQ ID NO: 6782 - DNA, 13 bp, Artificial Sequence
  Description of Artificial Sequence: Synthetic primer
accgtggaccacc

SEQ ID NO: 6783 - DNA, 13 bp, Artificial Sequence
  Description of Artificial Sequence: Synthetic primer
tctgtgccattta

SEQ ID NO: 6784 - DNA, 13 bp, Artificial Sequence
  Description of Artificial Sequence: Synthetic primer
cacgaggggaaaa

SEQ ID NO: 6785 - DNA, 13 bp, Artificial Sequence
  Description of Artificial Sequence: Synthetic primer
aaaatgaaatacc

SEQ ID NO: 6786 - DNA, 13 bp, Artificial Sequence
  Description of Artificial Sequence: Synthetic primer
tccttgaagaaga

SEQ ID NO: 6787 - DNA, 13 bp, Artificial Sequence
  Description of Artificial Sequence: Synthetic primer
gccctgctttatc

SEQ ID NO: 6788 - DNA, 13 bp, Artificial Sequence
  Description of Artificial Sequence: Synthetic primer
gaaacgcaaagat

SEQ ID NO: 6789 - DNA, 13 bp, Artificial Sequence
  Description of Artificial Sequence: Synthetic primer
cttcagcttcaag

SEQ ID NO: 6790 - DNA, 13 bp, Artificial Sequence
  Description of Artificial Sequence: Synthetic primer
tttgaagcgataa

SEQ ID NO: 6791 - DNA, 13 bp, Artificial Sequence
  Description of Artificial Sequence: Synthetic primer
cttcctatgttac

SEQ ID NO: 6792 - DNA, 13 bp, Artificial Sequence
  Description of Artificial Sequence: Synthetic primer
tgcccgactgttg

SEQ ID NO: 6793 - DNA, 13 bp, Artificial Sequence
  Description of Artificial Sequence: Synthetic primer
aggggaccatctc

SEQ ID NO: 6794 - DNA, 13 bp, Artificial Sequence
  Description of Artificial Sequence: Synthetic primer
ctcctcgcagtaa

SEQ ID NO: 6795 - DNA, 13 bp, Artificial Sequence
  Description of Artificial Sequence: Synthetic primer
gctctttagggaa

SEQ ID NO: 6796 - DNA, 13 bp, Artificial Sequence
  Description of Artificial Sequence: Synthetic primer
ttgccttaacatt

SEQ ID NO: 6797 - DNA, 13 bp, Artificial Sequence
  Description of Artificial Sequence: Synthetic primer
tactcttgaatac

SEQ ID NO: 6798 - DNA, 13 bp, Artificial Sequence
  Description of Artificial Sequence: Synthetic primer
cgggtatattcaa

SEQ ID NO: 6799 - DNA, 13 bp, Artificial Sequence
  Description of Artificial Sequence: Synthetic primer
gacacggtgacac

SEQ ID NO: 6800 - DNA, 13 bp, Artificial Sequence
  Description of Artificial Sequence: Synthetic primer
tcattaaggtttt

SEQ ID NO: 6801 - DNA, 13 bp, Artificial Sequence
  Description of Artificial Sequence: Synthetic primer
taacaaatagaca

SEQ ID NO: 6802 - DNA, 13 bp, Artificial Sequence
  Description of Artificial Sequence: Synthetic primer
agtccgaccaact

SEQ ID NO: 6803 - DNA, 13 bp, Artificial Sequence
  Description of Artificial Sequence: Synthetic primer
taatctccgtgcg

SEQ ID NO: 6804 - DNA, 13 bp, Artificial Sequence
  Description of Artificial Sequence: Synthetic primer
gggcaggttagtg

SEQ ID NO: 6805 - DNA, 13 bp, Artificial Sequence
  Description of Artificial Sequence: Synthetic primer
cctctaaagcaat

SEQ ID NO: 6806 - DNA, 13 bp, Artificial Sequence
  Description of Artificial Sequence: Synthetic primer
agttgtcacactg

SEQ ID NO: 6807 - DNA, 13 bp, Artificial Sequence
  Description of Artificial Sequence: Synthetic primer
gttctatctccac

SEQ ID NO: 6808 - DNA, 13 bp, Artificial Sequence
  Description of Artificial Sequence: Synthetic primer
tgcgacaccgcca

SEQ ID NO: 6809 - DNA, 13 bp, Artificial Sequence
  Description of Artificial Sequence: Synthetic primer
cgaaatcacccgt

SEQ ID NO: 6810 - DNA, 13 bp, Artificial Sequence
  Description of Artificial Sequence: Synthetic primer
tggcgtaatcggt

SEQ ID NO: 6811 - DNA, 13 bp, Artificial Sequence
  Description of Artificial Sequence: Synthetic primer
ctgccactcgtcg

SEQ ID NO: 6812 - DNA, 13 bp, Artificial Sequence
  Description of Artificial Sequence: Synthetic primer
cggtgtcatgggc

SEQ ID NO: 6813 - DNA, 13 bp, Artificial Sequence
  Description of Artificial Sequence: Synthetic primer
tcgcattcttcgc

SEQ ID NO: 6814 - DNA, 13 bp, Artificial Sequence
  Description of Artificial Sequence: Synthetic primer
gttttgccgctct

SEQ ID NO: 6815 - DNA, 13 bp, Artificial Sequence
  Description of Artificial Sequence: Synthetic primer
gcacatacatacc

SEQ ID NO: 6816 - DNA, 13 bp, Artificial Sequence
  Description of Artificial Sequence: Synthetic primer
tatattctcatcg

SEQ ID NO: 6817 - DNA, 13 bp, Artificial Sequence
  Description of Artificial Sequence: Synthetic primer
ggcactacgaatg

SEQ ID NO: 6818 - DNA, 13 bp, Artificial Sequence
  Description of Artificial Sequence: Synthetic primer
cgcaccgttggga

SEQ ID NO: 6819 - DNA, 13 bp, Artificial Sequence
  Description of Artificial Sequence: Synthetic primer
gccttcaccctgg

SEQ ID NO: 6820 - DNA, 13 bp, Artificial Sequence
  Description of Artificial Sequence: Synthetic primer
ttcgcccaccatg

SEQ ID NO: 6821 - DNA, 13 bp, Artificial Sequence
  Description of Artificial Sequence: Synthetic primer
tgttattctgcgg

SEQ ID NO: 6822 - DNA, 13 bp, Artificial Sequence
  Description of Artificial Sequence: Synthetic primer
gaggccacaacag

SEQ ID NO: 6823 - DNA, 13 bp, Artificial Sequence
  Description of Artificial Sequence: Synthetic primer
tgattttcgctgt

SEQ ID NO: 6824 - DNA, 13 bp, Artificial Sequence
  Description of Artificial Sequence: Synthetic primer
acaattgccagta

SEQ ID NO: 6825 - DNA, 13 bp, Artificial Sequence
  Description of Artificial Sequence: Synthetic primer
tttatctgtatga

SEQ ID NO: 6826 - DNA, 13 bp, Artificial Sequence
  Description of Artificial Sequence: Synthetic primer
acggcgtatggaa

SEQ ID NO: 6827 - DNA, 13 bp, Artificial Sequence
  Description of Artificial Sequence: Synthetic primer
gagcgggaacacg

SEQ ID NO: 6828 - DNA, 13 bp, Artificial Sequence
  Description of Artificial Sequence: Synthetic primer
catcctattcaca

SEQ ID NO: 6829 - DNA, 13 bp, Artificial Sequence
  Description of Artificial Sequence: Synthetic primer
taaccacacgacg

SEQ ID NO: 6830 - DNA, 13 bp, Artificial Sequence
  Description of Artificial Sequence: Synthetic primer
ccgacctgaccaa

SEQ ID NO: 6831 - DNA, 13 bp, Artificial Sequence
  Description of Artificial Sequence: Synthetic primer
agaccaccatcaa

SEQ ID NO: 6832 - DNA, 13 bp, Artificial Sequence
  Description of Artificial Sequence: Synthetic primer
tctgctccatcaa

SEQ ID NO: 6833 - DNA, 13 bp, Artificial Sequence
  Description of Artificial Sequence: Synthetic primer
aacgaaacataat

SEQ ID NO: 6834 - DNA, 13 bp, Artificial Sequence
  Description of Artificial Sequence: Synthetic primer
atgcacggcacgc

SEQ ID NO: 6835 - DNA, 13 bp, Artificial Sequence
  Description of Artificial Sequence: Synthetic primer
taattcttgcatt

SEQ ID NO: 6836 - DNA, 13 bp, Artificial Sequence
  Description of Artificial Sequence: Synthetic primer
cagctgtttatcg

SEQ ID NO: 6837 - DNA, 13 bp, Artificial Sequence
  Description of Artificial Sequence: Synthetic primer
atcaccacaattt

SEQ ID NO: 6838 - DNA, 13 bp, Artificial Sequence
  Description of Artificial Sequence: Synthetic primer
gcaccattaagat

SEQ ID NO: 6839 - DNA, 13 bp, Artificial Sequence
  Description of Artificial Sequence: Synthetic primer
cggccagaactcc

SEQ ID NO: 6840 - DNA, 13 bp, Artificial Sequence
  Description of Artificial Sequence: Synthetic primer
gacgtccgtcgtc

SEQ ID NO: 6841 - DNA, 13 bp, Artificial Sequence
  Description of Artificial Sequence: Synthetic primer
agataagctaacc

SEQ ID NO: 6842 - DNA, 13 bp, Artificial Sequence
  Description of Artificial Sequence: Synthetic primer
tcattgctcacga

SEQ ID NO: 6843 - DNA, 13 bp, Artificial Sequence
  Description of Artificial Sequence: Synthetic primer
taattttgttacg

SEQ ID NO: 6844 - DNA, 13 bp, Artificial Sequence
  Description of Artificial Sequence: Synthetic primer
cagagcatctact

SEQ ID NO: 6845 - DNA, 13 bp, Artificial Sequence
  Description of Artificial Sequence: Synthetic primer
cggcattttgaaa

SEQ ID NO: 6846 - DNA, 13 bp, Artificial Sequence
  Description of Artificial Sequence: Synthetic primer
atcagggagacga

SEQ ID NO: 6847 - DNA, 13 bp, Artificial Sequence
  Description of Artificial Sequence: Synthetic primer
agctctgcactag

SEQ ID NO: 6848 - DNA, 13 bp, Artificial Sequence
  Description of Artificial Sequence: Synthetic primer
gttccgggctttg

SEQ ID NO: 6849 - DNA, 13 bp, Artificial Sequence
  Description of Artificial Sequence: Synthetic primer
atagcaatatggg

SEQ ID NO: 6850 - DNA, 13 bp, Artificial Sequence
  Description of Artificial Sequence: Synthetic primer
caggtcgatgtcg

SEQ ID NO: 6851 - DNA, 13 bp, Artificial Sequence
  Description of Artificial Sequence: Synthetic primer
ttatcttcggcgg

SEQ ID NO: 6852 - DNA, 13 bp, Artificial Sequence
  Description of Artificial Sequence: Synthetic primer
aataagtgttttc

SEQ ID NO: 6853 - DNA, 13 bp, Artificial Sequence
  Description of Artificial Sequence: Synthetic primer
cgccttgagcgtc

SEQ ID NO: 6854 - DNA, 13 bp, Artificial Sequence
  Description of Artificial Sequence: Synthetic primer
ggattggcaaatt

SEQ ID NO: 6855 - DNA, 13 bp, Artificial Sequence
  Description of Artificial Sequence: Synthetic primer
tcgcaccgtacga

SEQ ID NO: 6856 - DNA, 13 bp, Artificial Sequence
  Description of Artificial Sequence: Synthetic primer
gctgtcttgtgcg

SEQ ID NO: 6857 - DNA, 13 bp, Artificial Sequence
  Description of Artificial Sequence: Synthetic primer
tcgccaacggcag

SEQ ID NO: 6858 - DNA, 13 bp, Artificial Sequence
  Description of Artificial Sequence: Synthetic primer
aaacctgctacaa

SEQ ID NO: 6859 - DNA, 13 bp, Artificial Sequence
  Description of Artificial Sequence: Synthetic primer
cgaagcgctcgtc

SEQ ID NO: 6860 - DNA, 13 bp, Artificial Sequence
  Description of Artificial Sequence: Synthetic primer
acggtaagtcccg

SEQ ID NO: 6861 - DNA, 13 bp, Artificial Sequence
  Description of Artificial Sequence: Synthetic primer
aaggtgtcgtggg

SEQ ID NO: 6862 - DNA, 13 bp, Artificial Sequence
  Description of Artificial Sequence: Synthetic primer
tggaaggataatc

SEQ ID NO: 6863 - DNA, 13 bp, Artificial Sequence
  Description of Artificial Sequence: Synthetic primer
ccgatcatcgaca

SEQ ID NO: 6864 - DNA, 13 bp, Artificial Sequence
  Description of Artificial Sequence: Synthetic primer
tgatctccccatt

SEQ ID NO: 6865 - DNA, 13 bp, Artificial Sequence
  Description of Artificial Sequence: Synthetic primer
gttggcgcaaaat

SEQ ID NO: 6866 - DNA, 13 bp, Artificial Sequence
  Description of Artificial Sequence: Synthetic primer
tattctgaagatt

SEQ ID NO: 6867 - DNA, 13 bp, Artificial Sequence
  Description of Artificial Sequence: Synthetic primer
tgctcgaccagcc

SEQ ID NO: 6868 - DNA, 13 bp, Artificial Sequence
  Description of Artificial Sequence: Synthetic primer
gaaaagcttagtg

SEQ ID NO: 6869 - DNA, 13 bp, Artificial Sequence
  Description of Artificial Sequence: Synthetic primer
ctgctggtcgaac

SEQ ID NO: 6870 - DNA, 13 bp, Artificial Sequence
  Description of Artificial Sequence: Synthetic primer
tcttggatcaatg

SEQ ID NO: 6871 - DNA, 13 bp, Artificial Sequence
  Description of Artificial Sequence: Synthetic primer
gcctcgacccgat

SEQ ID NO: 6872 - DNA, 13 bp, Artificial Sequence
  Description of Artificial Sequence: Synthetic primer
cacctccctgaaa

SEQ ID NO: 6873 - DNA, 13 bp, Artificial Sequence
  Description of Artificial Sequence: Synthetic primer
gatgtttatacaa

SEQ ID NO: 6874 - DNA, 13 bp, Artificial Sequence
  Description of Artificial Sequence: Synthetic primer
gaatctgttagct

SEQ ID NO: 6875 - DNA, 13 bp, Artificial Sequence
  Description of Artificial Sequence: Synthetic primer
ctgatttaatgcg

SEQ ID NO: 6876 - DNA, 13 bp, Artificial Sequence
  Description of Artificial Sequence: Synthetic primer
tacggtgaccagg

SEQ ID NO: 6877 - DNA, 13 bp, Artificial Sequence
  Description of Artificial Sequence: Synthetic primer
tagcaccgcgacc

SEQ ID NO: 6878 - DNA, 13 bp, Artificial Sequence
  Description of Artificial Sequence: Synthetic primer
gttaaatatccct

SEQ ID NO: 6879 - DNA, 13 bp, Artificial Sequence
  Description of Artificial Sequence: Synthetic primer
atatttggaacag

SEQ ID NO: 6880 - DNA, 13 bp, Artificial Sequence
  Description of Artificial Sequence: Synthetic primer
tttggctgaagca

SEQ ID NO: 6881 - DNA, 13 bp, Artificial Sequence
  Description of Artificial Sequence: Synthetic primer
atttgcaacagta

SEQ ID NO: 6882 - DNA, 13 bp, Artificial Sequence
  Description of Artificial Sequence: Synthetic primer
ttccgtcacgttc

SEQ ID NO: 6883 - DNA, 13 bp, Artificial Sequence
  Description of Artificial Sequence: Synthetic primer
gcggcgtcaacct

SEQ ID NO: 6884 - DNA, 13 bp, Artificial Sequence
  Description of Artificial Sequence: Synthetic primer
tgcttatggcttt

SEQ ID NO: 6885 - DNA, 13 bp, Artificial Sequence
  Description of Artificial Sequence: Synthetic primer
acacaagaacagc

SEQ ID NO: 6886 - DNA, 13 bp, Artificial Sequence
  Description of Artificial Sequence: Synthetic primer
ccggggaaggctt

SEQ ID NO: 6887 - DNA, 13 bp, Artificial Sequence
  Description of Artificial Sequence: Synthetic primer
cgttttcgcgctg

SEQ ID NO: 6888 - DNA, 13 bp, Artificial Sequence
  Description of Artificial Sequence: Synthetic primer
ccttattcccttt

SEQ ID NO: 6889 - DNA, 13 bp, Artificial Sequence
  Description of Artificial Sequence: Synthetic primer
aatagtaatggct

SEQ ID NO: 6890 - DNA, 13 bp, Artificial Sequence
  Description of Artificial Sequence: Synthetic primer
agattccgcagag

SEQ ID NO: 6891 - DNA, 13 bp, Artificial Sequence
  Description of Artificial Sequence: Synthetic primer
acgggcgtattgt

SEQ ID NO: 6892 - DNA, 13 bp, Artificial Sequence
  Description of Artificial Sequence: Synthetic primer
taccatttcatat

SEQ ID NO: 6893 - DNA, 13 bp, Artificial Sequence
  Description of Artificial Sequence: Synthetic primer
ctggttttacttt

SEQ ID NO: 6894 - DNA, 13 bp, Artificial Sequence
  Description of Artificial Sequence: Synthetic primer
atgaggaactgcc

SEQ ID NO: 6895 - DNA, 13 bp, Artificial Sequence
  Description of Artificial Sequence: Synthetic primer
gctgccgcaattg

SEQ ID NO: 6896 - DNA, 13 bp, Artificial Sequence
  Description of Artificial Sequence: Synthetic primer
caccctccatgtg

SEQ ID NO: 6897 - DNA, 13 bp, Artificial Sequence
  Description of Artificial Sequence: Synthetic primer
gcccttctttaca

SEQ ID NO: 6898 - DNA, 13 bp, Artificial Sequence
  Description of Artificial Sequence: Synthetic primer
cactattttaatc

SEQ ID NO: 6899 - DNA, 13 bp, Artificial Sequence
  Description of Artificial Sequence: Synthetic primer
cccgtggagttcc

SEQ ID NO: 6900 - DNA, 13 bp, Artificial Sequence
  Description of Artificial Sequence: Synthetic primer
aggtgttagctga

SEQ ID NO: 6901 - DNA, 13 bp, Artificial Sequence
  Description of Artificial Sequence: Synthetic primer
aaatgatgaaaca

SEQ ID NO: 6902 - DNA, 13 bp, Artificial Sequence
  Description of Artificial Sequence: Synthetic primer
tgccgacggtgac

SEQ ID NO: 6903 - DNA, 13 bp, Artificial Sequence
  Description of Artificial Sequence: Synthetic primer
gtctcagcggaag

SEQ ID NO: 6904 - DNA, 13 bp, Artificial Sequence
  Description of Artificial Sequence: Synthetic primer
accatatcagtgc

SEQ ID NO: 6905 - DNA, 13 bp, Artificial Sequence
  Description of Artificial Sequence: Synthetic primer
cgcgatcgattcc

SEQ ID NO: 6906 - DNA, 13 bp, Artificial Sequence
  Description of Artificial Sequence: Synthetic primer
ctagtaggtcgca

SEQ ID NO: 6907 - DNA, 13 bp, Artificial Sequence
  Description of Artificial Sequence: Synthetic primer
agatgtgcaggcg

SEQ ID NO: 6908 - DNA, 13 bp, Artificial Sequence
  Description of Artificial Sequence: Synthetic primer
tcctcctctgcca

SEQ ID NO: 6909 - DNA, 13 bp, Artificial Sequence
  Description of Artificial Sequence: Synthetic primer
gtctattatgctt

SEQ ID NO: 6910 - DNA, 13 bp, Artificial Sequence
  Description of Artificial Sequence: Synthetic primer
ttttctgataacg

SEQ ID NO: 6911 - DNA, 13 bp, Artificial Sequence
  Description of Artificial Sequence: Synthetic primer
taccaaagagcta

SEQ ID NO: 6912 - DNA, 13 bp, Artificial Sequence
  Description of Artificial Sequence: Synthetic primer
caatgagttccga

SEQ ID NO: 6913 - DNA, 13 bp, Artificial Sequence
  Description of Artificial Sequence: Synthetic primer
gagaatatttgat

SEQ ID NO: 6914 - DNA, 13 bp, Artificial Sequence
  Description of Artificial Sequence: Synthetic primer
gcccgatttctat

SEQ ID NO: 6915 - DNA, 13 bp, Artificial Sequence
  Description of Artificial Sequence: Synthetic primer
taccaaatcaagc

SEQ ID NO: 6916 - DNA, 13 bp, Artificial Sequence
  Description of Artificial Sequence: Synthetic primer
tatatcatcgaaa

SEQ ID NO: 6917 - DNA, 13 bp, Artificial Sequence
  Description of Artificial Sequence: Synthetic primer
aaacgggtaaggg

SEQ ID NO: 6918 - DNA, 13 bp, Artificial Sequence
  Description of Artificial Sequence: Synthetic primer
gggcagccagtac

SEQ ID NO: 6919 - DNA, 13 bp, Artificial Sequence
  Description of Artificial Sequence: Synthetic primer
tatggcaaagtag

SEQ ID NO: 6920 - DNA, 13 bp, Artificial Sequence
  Description of Artificial Sequence: Synthetic primer
gctaggctgcttt

SEQ ID NO: 6921 - DNA, 13 bp, Artificial Sequence
  Description of Artificial Sequence: Synthetic primer
gcaggaagctgac

SEQ ID NO: 6922 - DNA, 13 bp, Artificial Sequence
  Description of Artificial Sequence: Synthetic primer
gcattcgtcatgg

SEQ ID NO: 6923 - DNA, 13 bp, Artificial Sequence
  Description of Artificial Sequence: Synthetic primer
taaaataaaggcg

SEQ ID NO: 6924 - DNA, 13 bp, Artificial Sequence
  Description of Artificial Sequence: Synthetic primer
tttgacagctgtt

SEQ ID NO: 6925 - DNA, 13 bp, Artificial Sequence
  Description of Artificial Sequence: Synthetic primer
tgacggaagattt

SEQ ID NO: 6926 - DNA, 13 bp, Artificial Sequence
  Description of Artificial Sequence: Synthetic primer
tagttcatgtaga

SEQ ID NO: 6927 - DNA, 13 bp, Artificial Sequence
  Description of Artificial Sequence: Synthetic primer
gtcagcttgtagt

SEQ ID NO: 6928 - DNA, 13 bp, Artificial Sequence
  Description of Artificial Sequence: Synthetic primer
ggttttagccgta

SEQ ID NO: 6929 - DNA, 13 bp, Artificial Sequence
  Description of Artificial Sequence: Synthetic primer
aacccaagagatg

SEQ ID NO: 6930 - DNA, 13 bp, Artificial Sequence
  Description of Artificial Sequence: Synthetic primer
ttttcatcttcac

SEQ ID NO: 6931 - DNA, 13 bp, Artificial Sequence
  Description of Artificial Sequence: Synthetic primer
tatcaggccagct

SEQ ID NO: 6932 - DNA, 13 bp, Artificial Sequence
  Description of Artificial Sequence: Synthetic primer
aataagttctgga

SEQ ID NO: 6933 - DNA, 13 bp, Artificial Sequence
  Description of Artificial Sequence: Synthetic primer
gccattcgacgcg

SEQ ID NO: 6934 - DNA, 13 bp, Artificial Sequence
  Description of Artificial Sequence: Synthetic primer
gtggtgaacttaa

SEQ ID NO: 6935 - DNA, 13 bp, Artificial Sequence
  Description of Artificial Sequence: Synthetic primer
tcgcagggaacac

SEQ ID NO: 6936 - DNA, 13 bp, Artificial Sequence
  Description of Artificial Sequence: Synthetic primer
atttggtaggtgc

SEQ ID NO: 6937 - DNA, 13 bp, Artificial Sequence
  Description of Artificial Sequence: Synthetic primer
caggttgccatcc

SEQ ID NO: 6938 - DNA, 13 bp, Artificial Sequence
  Description of Artificial Sequence: Synthetic primer
ctcgtgcaacatg

SEQ ID NO: 6939 - DNA, 13 bp, Artificial Sequence
  Description of Artificial Sequence: Synthetic primer
cgatctgccgaac

SEQ ID NO: 6940 - DNA, 13 bp, Artificial Sequence
  Description of Artificial Sequence: Synthetic primer
tctccaactatcc

SEQ ID NO: 6941 - DNA, 13 bp, Artificial Sequence
  Description of Artificial Sequence: Synthetic primer
acgcaagattctt

SEQ ID NO: 6942 - DNA, 13 bp, Artificial Sequence
  Description of Artificial Sequence: Synthetic primer
tgcagtgttaatg

SEQ ID NO: 6943 - DNA, 13 bp, Artificial Sequence
  Description of Artificial Sequence: Synthetic primer
gtaaacgtcattt

SEQ ID NO: 6944 - DNA, 13 bp, Artificial Sequence
  Description of Artificial Sequence: Synthetic primer
cttttgaaagtac

SEQ ID NO: 6945 - DNA, 13 bp, Artificial Sequence
  Description of Artificial Sequence: Synthetic primer
tggtgtaaagaaa

SEQ ID NO: 6946 - DNA, 13 bp, Artificial Sequence
  Description of Artificial Sequence: Synthetic primer
gtttcgccattag

SEQ ID NO: 6947 - DNA, 13 bp, Artificial Sequence
  Description of Artificial Sequence: Synthetic primer
atcatgcttaatg

SEQ ID NO: 6948 - DNA, 13 bp, Artificial Sequence
  Description of Artificial Sequence: Synthetic primer
tcatgaagtcgcc

SEQ ID NO: 6949 - DNA, 13 bp, Artificial Sequence
  Description of Artificial Sequence: Synthetic primer
aaatctcctcatc

SEQ ID NO: 6950 - DNA, 13 bp, Artificial Sequence
  Description of Artificial Sequence: Synthetic primer
ttgatgatgccat

SEQ ID NO: 6951 - DNA, 13 bp, Artificial Sequence
  Description of Artificial Sequence: Synthetic primer
ctcttggcggttt

SEQ ID NO: 6952 - DNA, 13 bp, Artificial Sequence
  Description of Artificial Sequence: Synthetic primer
tccatgccggaag

SEQ ID NO: 6953 - DNA, 13 bp, Artificial Sequence
  Description of Artificial Sequence: Synthetic primer
ctgcaccagtgca

SEQ ID NO: 6954 - DNA, 13 bp, Artificial Sequence
  Description of Artificial Sequence: Synthetic primer
tgagtttccatga

SEQ ID NO: 6955 - DNA, 13 bp, Artificial Sequence
  Description of Artificial Sequence: Synthetic primer
tccaattcgtctg

SEQ ID NO: 6956 - DNA, 13 bp, Artificial Sequence
  Description of Artificial Sequence: Synthetic primer
tccaggcgacttc

SEQ ID NO: 6957 - DNA, 13 bp, Artificial Sequence
  Description of Artificial Sequence: Synthetic primer
tctatagtagctg

SEQ ID NO: 6958 - DNA, 13 bp, Artificial Sequence
  Description of Artificial Sequence: Synthetic primer
ttgaccagcgcgc

SEQ ID NO: 6959 - DNA, 13 bp, Artificial Sequence
  Description of Artificial Sequence: Synthetic primer
atcatgagccagt

SEQ ID NO: 6960 - DNA, 13 bp, Artificial Sequence
  Description of Artificial Sequence: Synthetic primer
ttgcgaaatattt

SEQ ID NO: 6961 - DNA, 13 bp, Artificial Sequence
  Description of Artificial Sequence: Synthetic primer
tacgaatgggcac

SEQ ID NO: 6962 - DNA, 13 bp, Artificial Sequence
  Description of Artificial Sequence: Synthetic primer
gatcgagcgatgc

SEQ ID NO: 6963 - DNA, 13 bp, Artificial Sequence
  Description of Artificial Sequence: Synthetic primer
cgctggcgtcaga

SEQ ID NO: 6964 - DNA, 13 bp, Artificial Sequence
  Description of Artificial Sequence: Synthetic primer
caggctttaaacg

SEQ ID NO: 6965 - DNA, 13 bp, Artificial Sequence
  Description of Artificial Sequence: Synthetic primer
tggcttttctgcc

SEQ ID NO: 6966 - DNA, 13 bp, Artificial Sequence
  Description of Artificial Sequence: Synthetic primer
tttacgagtggac

SEQ ID NO: 6967 - DNA, 13 bp, Artificial Sequence
  Description of Artificial Sequence: Synthetic primer
ataaaacggcagg

SEQ ID NO: 6968 - DNA, 13 bp, Artificial Sequence
  Description of Artificial Sequence: Synthetic primer
gaacttgccctgg

SEQ ID NO: 6969 - DNA, 13 bp, Artificial Sequence
  Description of Artificial Sequence: Synthetic primer
gtgatgcgatatc

SEQ ID NO: 6970 - DNA, 13 bp, Artificial Sequence
  Description of Artificial Sequence: Synthetic primer
gacaaatcaactc

SEQ ID NO: 6971 - DNA, 13 bp, Artificial Sequence
  Description of Artificial Sequence: Synthetic primer
ttgctgccacctt

SEQ ID NO: 6972 - DNA, 13 bp, Artificial Sequence
  Description of Artificial Sequence: Synthetic primer
gttcttcgccccg

SEQ ID NO: 6973 - DNA, 13 bp, Artificial Sequence
  Description of Artificial Sequence: Synthetic primer
gggatcaacgcgc

SEQ ID NO: 6974 - DNA, 13 bp, Artificial Sequence
  Description of Artificial Sequence: Synthetic primer
caggccgcttgtc

SEQ ID NO: 6975 - DNA, 13 bp, Artificial Sequence
  Description of Artificial Sequence: Synthetic primer
cttggctactggt

SEQ ID NO: 6976 - DNA, 13 bp, Artificial Sequence
  Description of Artificial Sequence: Synthetic primer
gttgttcttacgt

SEQ ID NO: 6977 - DNA, 13 bp, Artificial Sequence
  Description of Artificial Sequence: Synthetic primer
ccaaatgaaattt

SEQ ID NO: 6978 - DNA, 13 bp, Artificial Sequence
  Description of Artificial Sequence: Synthetic primer
tgtacttgtattg

SEQ ID NO: 6979 - DNA, 13 bp, Artificial Sequence
  Description of Artificial Sequence: Synthetic primer
tcttcgagacgcg

SEQ ID NO: 6980 - DNA, 13 bp, Artificial Sequence
  Description of Artificial Sequence: Synthetic primer
tacatggtgtcga

SEQ ID NO: 6981 - DNA, 13 bp, Artificial Sequence
  Description of Artificial Sequence: Synthetic primer
catttgtaccacc

SEQ ID NO: 6982 - DNA, 13 bp, Artificial Sequence
  Description of Artificial Sequence: Synthetic primer
agtggcaacgcca

SEQ ID NO: 6983 - DNA, 13 bp, Artificial Sequence
  Description of Artificial Sequence: Synthetic primer
gaaccaggcgcac

SEQ ID NO: 6984 - DNA, 13 bp, Artificial Sequence
  Description of Artificial Sequence: Synthetic primer
tttatgggataga

SEQ ID NO: 6985 - DNA, 13 bp, Artificial Sequence
  Description of Artificial Sequence: Synthetic primer
gttgcagcctcaa

SEQ ID NO: 6986 - DNA, 13 bp, Artificial Sequence
  Description of Artificial Sequence: Synthetic primer
taattgcgagccc

SEQ ID NO: 6987 - DNA, 13 bp, Artificial Sequence
  Description of Artificial Sequence: Synthetic primer
taaaggcgatact

SEQ ID NO: 6988 - DNA, 13 bp, Artificial Sequence
  Description of Artificial Sequence: Synthetic primer
tcgagcgcctgca

SEQ ID NO: 6989 - DNA, 13 bp, Artificial Sequence
  Description of Artificial Sequence: Synthetic primer
acttgtagccttt

SEQ ID NO: 6990 - DNA, 13 bp, Artificial Sequence
  Description of Artificial Sequence: Synthetic primer
cgatgggcgtcta

SEQ ID NO: 6991 - DNA, 13 bp, Artificial Sequence
  Description of Artificial Sequence: Synthetic primer
gtcgaaagagcca

SEQ ID NO: 6992 - DNA, 13 bp, Artificial Sequence
  Description of Artificial Sequence: Synthetic primer
cgtccagcaggag

SEQ ID NO: 6993 - DNA, 13 bp, Artificial Sequence
  Description of Artificial Sequence: Synthetic primer
cgatctctattta

SEQ ID NO: 6994 - DNA, 13 bp, Artificial Sequence
  Description of Artificial Sequence: Synthetic primer
tcggcatcgccta

SEQ ID NO: 6995 - DNA, 13 bp, Artificial Sequence
  Description of Artificial Sequence: Synthetic primer
tgactgacctttc

SEQ ID NO: 6996 - DNA, 13 bp, Artificial Sequence
  Description of Artificial Sequence: Synthetic primer
ggtggtcgaggaa

SEQ ID NO: 6997 - DNA, 13 bp, Artificial Sequence
  Description of Artificial Sequence: Synthetic primer
tgatagcgcattg

SEQ ID NO: 6998 - DNA, 13 bp, Artificial Sequence
  Description of Artificial Sequence: Synthetic primer
tatcgatcggccc

SEQ ID NO: 6999 - DNA, 13 bp, Artificial Sequence
  Description of Artificial Sequence: Synthetic primer
acgtcactcacct

SEQ ID NO: 7000 - DNA, 13 bp, Artificial Sequence
  Description of Artificial Sequence: Synthetic primer
tttcaggttggac

SEQ ID NO: 7001 - DNA, 13 bp, Artificial Sequence
  Description of Artificial Sequence: Synthetic primer
ttatggtctggaa

SEQ ID NO: 7002 - DNA, 13 bp, Artificial Sequence
  Description of Artificial Sequence: Synthetic primer
cgcctgaaaggct

SEQ ID NO: 7003 - DNA, 13 bp, Artificial Sequence
  Description of Artificial Sequence: Synthetic primer
tgttcaccataca

SEQ ID NO: 7004 - DNA, 13 bp, Artificial Sequence
  Description of Artificial Sequence: Synthetic primer
ggcttcgaccgca

SEQ ID NO: 7005 - DNA, 13 bp, Artificial Sequence
  Description of Artificial Sequence: Synthetic primer
cctcatcacggct

SEQ ID NO: 7006 - DNA, 13 bp, Artificial Sequence
  Description of Artificial Sequence: Synthetic primer
gttacgcctctgt

SEQ ID NO: 7007 - DNA, 13 bp, Artificial Sequence
  Description of Artificial Sequence: Synthetic primer
aactcaattcaga

SEQ ID NO: 7008 - DNA, 13 bp, Artificial Sequence
  Description of Artificial Sequence: Synthetic primer
gaccagcgcatca

SEQ ID NO: 7009 - DNA, 13 bp, Artificial Sequence
  Description of Artificial Sequence: Synthetic primer
atggcgcagcgga

SEQ ID NO: 7010 - DNA, 13 bp, Artificial Sequence
  Description of Artificial Sequence: Synthetic primer
cgctgcttgagct

SEQ ID NO: 7011 - DNA, 13 bp, Artificial Sequence
  Description of Artificial Sequence: Synthetic primer
cagctcaacgttg

SEQ ID NO: 7012 - DNA, 13 bp, Artificial Sequence
  Description of Artificial Sequence: Synthetic primer
ctggaacagctgc

SEQ ID NO: 7013 - DNA, 13 bp, Artificial Sequence
  Description of Artificial Sequence: Synthetic primer
cggtcttcgcctg

SEQ ID NO: 7014 - DNA, 13 bp, Artificial Sequence
  Description of Artificial Sequence: Synthetic primer
cttcccgtccttg

SEQ ID NO: 7015 - DNA, 13 bp, Artificial Sequence
  Description of Artificial Sequence: Synthetic primer
cgcctgatcaatg

SEQ ID NO: 7016 - DNA, 13 bp, Artificial Sequence
  Description of Artificial Sequence: Synthetic primer
agcgacaaaagat

SEQ ID NO: 7017 - DNA, 13 bp, Artificial Sequence
  Description of Artificial Sequence: Synthetic primer
catatagcatgac

SEQ ID NO: 7018 - DNA, 13 bp, Artificial Sequence
  Description of Artificial Sequence: Synthetic primer
gcttttgtggccg

SEQ ID NO: 7019 - DNA, 13 bp, Artificial Sequence
  Description of Artificial Sequence: Synthetic primer
gtatcgatctgga

SEQ ID NO: 7020 - DNA, 13 bp, Artificial Sequence
  Description of Artificial Sequence: Synthetic primer
ggtcagctgcaac

SEQ ID NO: 7021 - DNA, 13 bp, Artificial Sequence
  Description of Artificial Sequence: Synthetic primer
gacgttcgccttt

SEQ ID NO: 7022 - DNA, 13 bp, Artificial Sequence
  Description of Artificial Sequence: Synthetic primer
cagatgcttttgg

SEQ ID NO: 7023 - DNA, 13 bp, Artificial Sequence
  Description of Artificial Sequence: Synthetic primer
accacacactcgg

SEQ ID NO: 7024 - DNA, 13 bp, Artificial Sequence
  Description of Artificial Sequence: Synthetic primer
agagcccgatgcc

SEQ ID NO: 7025 - DNA, 13 bp, Artificial Sequence
  Description of Artificial Sequence: Synthetic primer
aaggtatcggcta

SEQ ID NO: 7026 - DNA, 13 bp, Artificial Sequence
  Description of Artificial Sequence: Synthetic primer
aaaattcccgcaa

SEQ ID NO: 7027 - DNA, 13 bp, Artificial Sequence
  Description of Artificial Sequence: Synthetic primer
gaaacgcacctat

SEQ ID NO: 7028 - DNA, 13 bp, Artificial Sequence
  Description of Artificial Sequence: Synthetic primer
taacagtttgttc

SEQ ID NO: 7029 - DNA, 13 bp, Artificial Sequence
  Description of Artificial Sequence: Synthetic primer
aaccatttcaccg

SEQ ID NO: 7030 - DNA, 13 bp, Artificial Sequence
  Description of Artificial Sequence: Synthetic primer
cttccggtatcgg

SEQ ID NO: 7031 - DNA, 13 bp, Artificial Sequence
  Description of Artificial Sequence: Synthetic primer
caattggagaagt

SEQ ID NO: 7032 - DNA, 13 bp, Artificial Sequence
  Description of Artificial Sequence: Synthetic primer
cgggacatcagga

SEQ ID NO: 7033 - DNA, 13 bp, Artificial Sequence
  Description of Artificial Sequence: Synthetic primer
tccatgaatcagt

SEQ ID NO: 7034 - DNA, 13 bp, Artificial Sequence
  Description of Artificial Sequence: Synthetic primer
cctagtcttcctg

SEQ ID NO: 7035 - DNA, 13 bp, Artificial Sequence
  Description of Artificial Sequence: Synthetic primer
gacctggtcgcta

SEQ ID NO: 7036 - DNA, 13 bp, Artificial Sequence
  Description of Artificial Sequence: Synthetic primer
tgcgttcaaggaa

SEQ ID NO: 7037 - DNA, 13 bp, Artificial Sequence
  Description of Artificial Sequence: Synthetic primer
tcggtgtcgccga

SEQ ID NO: 7038 - DNA, 13 bp, Artificial Sequence
  Description of Artificial Sequence: Synthetic primer
tcgaacggcttgt

SEQ ID NO: 7039 - DNA, 13 bp, Artificial Sequence
  Description of Artificial Sequence: Synthetic primer
gtcaccttggtca

SEQ ID NO: 7040 - DNA, 13 bp, Artificial Sequence
  Description of Artificial Sequence: Synthetic primer
gcgacttcacaca

SEQ ID NO: 7041 - DNA, 13 bp, Artificial Sequence
  Description of Artificial Sequence: Synthetic primer
ctccaaacaacga

SEQ ID NO: 7042 - DNA, 13 bp, Artificial Sequence
  Description of Artificial Sequence: Synthetic primer
aactcggttaccg

SEQ ID NO: 7043 - DNA, 13 bp, Artificial Sequence
  Description of Artificial Sequence: Synthetic primer
gttatttgcggga

SEQ ID NO: 7044 - DNA, 13 bp, Artificial Sequence
  Description of Artificial Sequence: Synthetic primer
aaggtgtgcgcgt

SEQ ID NO: 7045 - DNA, 13 bp, Artificial Sequence
  Description of Artificial Sequence: Synthetic primer
ttggataaacggg

SEQ ID NO: 7046 - DNA, 13 bp, Artificial Sequence
  Description of Artificial Sequence: Synthetic primer
ttccaaatagcct

SEQ ID NO: 7047 - DNA, 13 bp, Artificial Sequence
  Description of Artificial Sequence: Synthetic primer
gagttgctccata

SEQ ID NO: 7048 - DNA, 13 bp, Artificial Sequence
  Description of Artificial Sequence: Synthetic primer
gatttgtccgaag

SEQ ID NO: 7049 - DNA, 13 bp, Artificial Sequence
  Description of Artificial Sequence: Synthetic primer
acgtcacccggtt

SEQ ID NO: 7050 - DNA, 13 bp, Artificial Sequence
  Description of Artificial Sequence: Synthetic primer
atttatctcccgt

SEQ ID NO: 7051 - DNA, 13 bp, Artificial Sequence
  Description of Artificial Sequence: Synthetic primer
cactggaacctgt

SEQ ID NO: 7052 - DNA, 13 bp, Artificial Sequence
  Description of Artificial Sequence: Synthetic primer
cgccatttatata

SEQ ID NO: 7053 - DNA, 13 bp, Artificial Sequence
  Description of Artificial Sequence: Synthetic primer
ggtccaatcgcag

SEQ ID NO: 7054 - DNA, 13 bp, Artificial Sequence
  Description of Artificial Sequence: Synthetic primer
cttccgtcacaat

SEQ ID NO: 7055 - DNA, 13 bp, Artificial Sequence
  Description of Artificial Sequence: Synthetic primer
atcgcacaaccac

SEQ ID NO: 7056 - DNA, 13 bp, Artificial Sequence
  Description of Artificial Sequence: Synthetic primer
ataaatgcgatga

SEQ ID NO: 7057 - DNA, 13 bp, Artificial Sequence
  Description of Artificial Sequence: Synthetic primer
agcagcgactctg

SEQ ID NO: 7058 - DNA, 13 bp, Artificial Sequence
  Description of Artificial Sequence: Synthetic primer
aacgagaattcag

SEQ ID NO: 7059 - DNA, 13 bp, Artificial Sequence
  Description of Artificial Sequence: Synthetic primer
tctatcatgaatt

SEQ ID NO: 7060 - DNA, 13 bp, Artificial Sequence
  Description of Artificial Sequence: Synthetic primer
cgcagttatctta

SEQ ID NO: 7061 - DNA, 13 bp, Artificial Sequence
  Description of Artificial Sequence: Synthetic primer
cctgcgtcagctt

SEQ ID NO: 7062 - DNA, 13 bp, Artificial Sequence
  Description of Artificial Sequence: Synthetic primer
agccactgcaccg

SEQ ID NO: 7063 - DNA, 13 bp, Artificial Sequence
  Description of Artificial Sequence: Synthetic primer
gcttccatcctcc

SEQ ID NO: 7064 - DNA, 13 bp, Artificial Sequence
  Description of Artificial Sequence: Synthetic primer
gacctggaacatt

SEQ ID NO: 7065 - DNA, 13 bp, Artificial Sequence
  Description of Artificial Sequence: Synthetic primer
cccagattcggcc

SEQ ID NO: 7066 - DNA, 13 bp, Artificial Sequence
  Description of Artificial Sequence: Synthetic primer
cgtggcacaaagt

SEQ ID NO: 7067 - DNA, 13 bp, Artificial Sequence
  Description of Artificial Sequence: Synthetic primer
aacggctttcggc

SEQ ID NO: 7068 - DNA, 13 bp, Artificial Sequence
  Description of Artificial Sequence: Synthetic primer
cggtggagttgcg

SEQ ID NO: 7069 - DNA, 13 bp, Artificial Sequence
  Description of Artificial Sequence: Synthetic primer
gtcaacagaggaa

SEQ ID NO: 7070 - DNA, 13 bp, Artificial Sequence
  Description of Artificial Sequence: Synthetic primer
cttttcaggaata

SEQ ID NO: 7071 - DNA, 13 bp, Artificial Sequence
  Description of Artificial Sequence: Synthetic primer
ctgatttgcgccg

SEQ ID NO: 7072 - DNA, 13 bp, Artificial Sequence
  Description of Artificial Sequence: Synthetic primer
agataaaagaagt

SEQ ID NO: 7073 - DNA, 13 bp, Artificial Sequence
  Description of Artificial Sequence: Synthetic primer
gctgtacagcagc

SEQ ID NO: 7074 - DNA, 13 bp, Artificial Sequence
  Description of Artificial Sequence: Synthetic primer
ccggtggtggtag

SEQ ID NO: 7075 - DNA, 13 bp, Artificial Sequence
  Description of Artificial Sequence: Synthetic primer
agccggcaagcaa

SEQ ID NO: 7076 - DNA, 13 bp, Artificial Sequence
  Description of Artificial Sequence: Synthetic primer
gacatacatgcca

SEQ ID NO: 7077 - DNA, 13 bp, Artificial Sequence
  Description of Artificial Sequence: Synthetic primer
tttctcttcggtg

SEQ ID NO: 7078 - DNA, 13 bp, Artificial Sequence
  Description of Artificial Sequence: Synthetic primer
ttcagaaatgagt

SEQ ID NO: 7079 - DNA, 13 bp, Artificial Sequence
  Description of Artificial Sequence: Synthetic primer
acggcatcgtgct

SEQ ID NO: 7080 - DNA, 13 bp, Artificial Sequence
  Description of Artificial Sequence: Synthetic primer
gaaagattattca

SEQ ID NO: 7081 - DNA, 13 bp, Artificial Sequence
  Description of Artificial Sequence: Synthetic primer
aatgcgcaatttg

SEQ ID NO: 7082 - DNA, 13 bp, Artificial Sequence
  Description of Artificial Sequence: Synthetic primer
agatccttccgga

SEQ ID NO: 7083 - DNA, 13 bp, Artificial Sequence
  Description of Artificial Sequence: Synthetic primer
tgagctttatttg

SEQ ID NO: 7084 - DNA, 13 bp, Artificial Sequence
  Description of Artificial Sequence: Synthetic primer
gtcatcgggtgaa

SEQ ID NO: 7085 - DNA, 13 bp, Artificial Sequence
  Description of Artificial Sequence: Synthetic primer
agcttccatcaac

SEQ ID NO: 7086 - DNA, 13 bp, Artificial Sequence
  Description of Artificial Sequence: Synthetic primer
ctaatatctccaa

SEQ ID NO: 7087 - DNA, 13 bp, Artificial Sequence
  Description of Artificial Sequence: Synthetic primer
tcattttgtgtga

SEQ ID NO: 7088 - DNA, 13 bp, Artificial Sequence
  Description of Artificial Sequence: Synthetic primer
gaaggacgaactg

SEQ ID NO: 7089 - DNA, 13 bp, Artificial Sequence
  Description of Artificial Sequence: Synthetic primer
gcggtcatgtcga

SEQ ID NO: 7090 - DNA, 13 bp, Artificial Sequence
  Description of Artificial Sequence: Synthetic primer
ccatcgtgatgcc

SEQ ID NO: 7091 - DNA, 13 bp, Artificial Sequence
  Description of Artificial Sequence: Synthetic primer
ggcacaatcaagt

SEQ ID NO: 7092 - DNA, 13 bp, Artificial Sequence
  Description of Artificial Sequence: Synthetic primer
tatactggatcgg

SEQ ID NO: 7093 - DNA, 13 bp, Artificial Sequence
  Description of Artificial Sequence: Synthetic primer
aagttcatccaca

SEQ ID NO: 7094 - DNA, 13 bp, Artificial Sequence
  Description of Artificial Sequence: Synthetic primer
tcgaggatattgg

SEQ ID NO: 7095 - DNA, 13 bp, Artificial Sequence
  Description of Artificial Sequence: Synthetic primer
aaggctctcaagg

SEQ ID NO: 7096 - DNA, 13 bp, Artificial Sequence
  Description of Artificial Sequence: Synthetic primer
gacgcccactgct

SEQ ID NO: 7097 - DNA, 13 bp, Artificial Sequence
  Description of Artificial Sequence: Synthetic primer
taacgccgtcgct

SEQ ID NO: 7098 - DNA, 13 bp, Artificial Sequence
  Description of Artificial Sequence: Synthetic primer
tattcccttccaa

SEQ ID NO: 7099 - DNA, 13 bp, Artificial Sequence
  Description of Artificial Sequence: Synthetic primer
acttgatcgggtt

SEQ ID NO: 7100 - DNA, 13 bp, Artificial Sequence
  Description of Artificial Sequence: Synthetic primer
ttgaaccgctgta

SEQ ID NO: 7101 - DNA, 13 bp, Artificial Sequence
  Description of Artificial Sequence: Synthetic primer
ttgctaactcagt

SEQ ID NO: 7102 - DNA, 13 bp, Artificial Sequence
  Description of Artificial Sequence: Synthetic primer
gaagatgcgattg

SEQ ID NO: 7103 - DNA, 13 bp, Artificial Sequence
  Description of Artificial Sequence: Synthetic primer
catccagctcgtc

SEQ ID NO: 7104 - DNA, 13 bp, Artificial Sequence
  Description of Artificial Sequence: Synthetic primer
tattaaacaccct

SEQ ID NO: 7105 - DNA, 13 bp, Artificial Sequence
  Description of Artificial Sequence: Synthetic primer
ggcaagcgaacgt

SEQ ID NO: 7106 - DNA, 13 bp, Artificial Sequence
  Description of Artificial Sequence: Synthetic primer
gatccgaattcgg

SEQ ID NO: 7107 - DNA, 13 bp, Artificial Sequence
  Description of Artificial Sequence: Synthetic primer
ttgcgcggattca

SEQ ID NO: 7108 - DNA, 13 bp, Artificial Sequence
  Description of Artificial Sequence: Synthetic primer
attagacgtccga

SEQ ID NO: 7109 - DNA, 13 bp, Artificial Sequence
  Description of Artificial Sequence: Synthetic primer
acttaccgcagca

SEQ ID NO: 7110 - DNA, 13 bp, Artificial Sequence
  Description of Artificial Sequence: Synthetic primer
aattatcagcatt

SEQ ID NO: 7111 - DNA, 13 bp, Artificial Sequence
  Description of Artificial Sequence: Synthetic primer
ttcacttctcttg

SEQ ID NO: 7112 - DNA, 13 bp, Artificial Sequence
  Description of Artificial Sequence: Synthetic primer
tgcgttgaagtca

SEQ ID NO: 7113 - DNA, 13 bp, Artificial Sequence
  Description of Artificial Sequence: Synthetic primer
gataataatccgt

SEQ ID NO: 7114 - DNA, 13 bp, Artificial Sequence
  Description of Artificial Sequence: Synthetic primer
actttccgcactt

SEQ ID NO: 7115 - DNA, 13 bp, Artificial Sequence
  Description of Artificial Sequence: Synthetic primer
ctgtgatgtataa

SEQ ID NO: 7116 - DNA, 13 bp, Artificial Sequence
  Description of Artificial Sequence: Synthetic primer
cgaataacatgcc

SEQ ID NO: 7117 - DNA, 13 bp, Artificial Sequence
  Description of Artificial Sequence: Synthetic primer
gtcattttattgc

SEQ ID NO: 7118 - DNA, 13 bp, Artificial Sequence
  Description of Artificial Sequence: Synthetic primer
atgcttgccctgg

SEQ ID NO: 7119 - DNA, 13 bp, Artificial Sequence
  Description of Artificial Sequence: Synthetic primer
ttcaagtgtcgtt

SEQ ID NO: 7120 - DNA, 13 bp, Artificial Sequence
  Description of Artificial Sequence: Synthetic primer
tatccatttatgt

SEQ ID NO: 7121 - DNA, 13 bp, Artificial Sequence
  Description of Artificial Sequence: Synthetic primer
accaacggcacca

SEQ ID NO: 7122 - DNA, 13 bp, Artificial Sequence
  Description of Artificial Sequence: Synthetic primer
atggtggcgaccg

SEQ ID NO: 7123 - DNA, 13 bp, Artificial Sequence
  Description of Artificial Sequence: Synthetic primer
tgatacagcgtca

SEQ ID NO: 7124 - DNA, 13 bp, Artificial Sequence
  Description of Artificial Sequence: Synthetic primer
gaaatcattctta

SEQ ID NO: 7125 - DNA, 13 bp, Artificial Sequence
  Description of Artificial Sequence: Synthetic primer
atcaggcagccca

SEQ ID NO: 7126 - DNA, 13 bp, Artificial Sequence
  Description of Artificial Sequence: Synthetic primer
ggcagcagtatct

SEQ ID NO: 7127 - DNA, 13 bp, Artificial Sequence
  Description of Artificial Sequence: Synthetic primer
ctgggccacaata

SEQ ID NO: 7128 - DNA, 13 bp, Artificial Sequence
  Description of Artificial Sequence: Synthetic primer
aaatggcatgggc

SEQ ID NO: 7129 - DNA, 13 bp, Artificial Sequence
  Description of Artificial Sequence: Synthetic primer
cgccacaccaaaa

SEQ ID NO: 7130 - DNA, 13 bp, Artificial Sequence
  Description of Artificial Sequence: Synthetic primer
tgatgaatgcgat

SEQ ID NO: 7131 - DNA, 13 bp, Artificial Sequence
  Description of Artificial Sequence: Synthetic primer
gtctcgcctgcat

SEQ ID NO: 7132 - DNA, 13 bp, Artificial Sequence
  Description of Artificial Sequence: Synthetic primer
caagatcatcggg

SEQ ID NO: 7133 - DNA, 13 bp, Artificial Sequence
  Description of Artificial Sequence: Synthetic primer
cacgctgatggcg

SEQ ID NO: 7134 - DNA, 13 bp, Artificial Sequence
  Description of Artificial Sequence: Synthetic primer
tgtcgcactcatt

SEQ ID NO: 7135 - DNA, 13 bp, Artificial Sequence
  Description of Artificial Sequence: Synthetic primer
tttgatttgcttt

SEQ ID NO: 7136 - DNA, 13 bp, Artificial Sequence
  Description of Artificial Sequence: Synthetic primer
tcctgcgctttga

SEQ ID NO: 7137 - DNA, 13 bp, Artificial Sequence
  Description of Artificial Sequence: Synthetic primer
gctatcgtccggt

SEQ ID NO: 7138 - DNA, 13 bp, Artificial Sequence
  Description of Artificial Sequence: Synthetic primer
acgccgctggaat

SEQ ID NO: 7139 - DNA, 13 bp, Artificial Sequence
  Description of Artificial Sequence: Synthetic primer
cttcctgcccgaa

SEQ ID NO: 7140 - DNA, 13 bp, Artificial Sequence
  Description of Artificial Sequence: Synthetic primer
ctactactttctc

SEQ ID NO: 7141 - DNA, 13 bp, Artificial Sequence
  Description of Artificial Sequence: Synthetic primer
ataaccaacacac

SEQ ID NO: 7142 - DNA, 13 bp, Artificial Sequence
  Description of Artificial Sequence: Synthetic primer
acgctcattggaa

SEQ ID NO: 7143 - DNA, 13 bp, Artificial Sequence
  Description of Artificial Sequence: Synthetic primer
agcctggggttcc

SEQ ID NO: 7144 - DNA, 13 bp, Artificial Sequence
  Description of Artificial Sequence: Synthetic primer
ttggagtagaaag

SEQ ID NO: 7145 - DNA, 13 bp, Artificial Sequence
  Description of Artificial Sequence: Synthetic primer
gctccacggtggt

SEQ ID NO: 7146 - DNA, 13 bp, Artificial Sequence
  Description of Artificial Sequence: Synthetic primer
tgcaggcgaagct

SEQ ID NO: 7147 - DNA, 13 bp, Artificial Sequence
  Description of Artificial Sequence: Synthetic primer
ttggcgcacgcga

SEQ ID NO: 7148 - DNA, 13 bp, Artificial Sequence
  Description of Artificial Sequence: Synthetic primer
agtcaaaacttta

SEQ ID NO: 7149 - DNA, 13 bp, Artificial Sequence
  Description of Artificial Sequence: Synthetic primer
gaaacctcctcgg

SEQ ID NO: 7150 - DNA, 13 bp, Artificial Sequence
  Description of Artificial Sequence: Synthetic primer
agaccgcacactc

SEQ ID NO: 7151 - DNA, 13 bp, Artificial Sequence
  Description of Artificial Sequence: Synthetic primer
cggcaggctggtt

SEQ ID NO: 7152 - DNA, 13 bp, Artificial Sequence
  Description of Artificial Sequence: Synthetic primer
ccaagatcactct

SEQ ID NO: 7153 - DNA, 13 bp, Artificial Sequence
  Description of Artificial Sequence: Synthetic primer
ctgctcacctccg

SEQ ID NO: 7154 - DNA, 13 bp, Artificial Sequence
  Description of Artificial Sequence: Synthetic primer
cgagagtgatccc

SEQ ID NO: 7155 - DNA, 13 bp, Artificial Sequence
  Description of Artificial Sequence: Synthetic primer
aattctacttaca

SEQ ID NO: 7156 - DNA, 13 bp, Artificial Sequence
  Description of Artificial Sequence: Synthetic primer
aacctcttatctt

SEQ ID NO: 7157 - DNA, 13 bp, Artificial Sequence
  Description of Artificial Sequence: Synthetic primer
ttcgtaaacgatg

SEQ ID NO: 7158 - DNA, 13 bp, Artificial Sequence
  Description of Artificial Sequence: Synthetic primer
cagttgatcctgt

SEQ ID NO: 7159 - DNA, 13 bp, Artificial Sequence
  Description of Artificial Sequence: Synthetic primer
taagtgcctcaag

SEQ ID NO: 7160 - DNA, 13 bp, Artificial Sequence
  Description of Artificial Sequence: Synthetic primer
atgcttctttatc

SEQ ID NO: 7161 - DNA, 13 bp, Artificial Sequence
  Description of Artificial Sequence: Synthetic primer
acggtaaatgata

SEQ ID NO: 7162 - DNA, 13 bp, Artificial Sequence
  Description of Artificial Sequence: Synthetic primer
ttctcgccgctga

SEQ ID NO: 7163 - DNA, 13 bp, Artificial Sequence
  Description of Artificial Sequence: Synthetic primer
caatcgtcaactt

SEQ ID NO: 7164 - DNA, 13 bp, Artificial Sequence
  Description of Artificial Sequence: Synthetic primer
ccgcaaccaggat

SEQ ID NO: 7165 - DNA, 13 bp, Artificial Sequence
  Description of Artificial Sequence: Synthetic primer
tcgtacggataaa

SEQ ID NO: 7166 - DNA, 13 bp, Artificial Sequence
  Description of Artificial Sequence: Synthetic primer
tagatcagaaaac

SEQ ID NO: 7167 - DNA, 13 bp, Artificial Sequence
  Description of Artificial Sequence: Synthetic primer
tatgtgcatcagc

SEQ ID NO: 7168 - DNA, 13 bp, Artificial Sequence
  Description of Artificial Sequence: Synthetic primer
tcttcagggttag

SEQ ID NO: 7169 - DNA, 13 bp, Artificial Sequence
  Description of Artificial Sequence: Synthetic primer
agaaatggtgcgt

SEQ ID NO: 7170 - DNA, 13 bp, Artificial Sequence
  Description of Artificial Sequence: Synthetic primer
gtctatgcgcagc

SEQ ID NO: 7171 - DNA, 13 bp, Artificial Sequence
  Description of Artificial Sequence: Synthetic primer
gtccgcgcatcca

SEQ ID NO: 7172 - DNA, 13 bp, Artificial Sequence
  Description of Artificial Sequence: Synthetic primer
acacagtgctggt

SEQ ID NO: 7173 - DNA, 13 bp, Artificial Sequence
  Description of Artificial Sequence: Synthetic primer
ggacagtatgcaa

SEQ ID NO: 7174 - DNA, 13 bp, Artificial Sequence
  Description of Artificial Sequence: Synthetic primer
tcgttaccgctaa

SEQ ID NO: 7175 - DNA, 13 bp, Artificial Sequence
  Description of Artificial Sequence: Synthetic primer
tcttctggtacga

SEQ ID NO: 7176 - DNA, 13 bp, Artificial Sequence
  Description of Artificial Sequence: Synthetic primer
ccagacgcaaatg

SEQ ID NO: 7177 - DNA, 13 bp, Artificial Sequence
  Description of Artificial Sequence: Synthetic primer
gaggcgaacaggg

SEQ ID NO: 7178 - DNA, 13 bp, Artificial Sequence
  Description of Artificial Sequence: Synthetic primer
actgctgcttgct

SEQ ID NO: 7179 - DNA, 13 bp, Artificial Sequence
  Description of Artificial Sequence: Synthetic primer
ctgcgacgagcca

SEQ ID NO: 7180 - DNA, 13 bp, Artificial Sequence
  Description of Artificial Sequence: Synthetic primer
cggtgcttggaaa

SEQ ID NO: 7181 - DNA, 13 bp, Artificial Sequence
  Description of Artificial Sequence: Synthetic primer
cgatcaagtaagg

SEQ ID NO: 7182 - DNA, 13 bp, Artificial Sequence
  Description of Artificial Sequence: Synthetic primer
tgacattacttcc

SEQ ID NO: 7183 - DNA, 13 bp, Artificial Sequence
  Description of Artificial Sequence: Synthetic primer
gcctgctggtgaa

SEQ ID NO: 7184 - DNA, 13 bp, Artificial Sequence
  Description of Artificial Sequence: Synthetic primer
ttttggcgttgag

SEQ ID NO: 7185 - DNA, 13 bp, Artificial Sequence
  Description of Artificial Sequence: Synthetic primer
tcttcgtagctca

SEQ ID NO: 7186 - DNA, 13 bp, Artificial Sequence
  Description of Artificial Sequence: Synthetic primer
atatgactctggc

SEQ ID NO: 7187 - DNA, 13 bp, Artificial Sequence
  Description of Artificial Sequence: Synthetic primer
cacgtagaggccc

SEQ ID NO: 7188 - DNA, 13 bp, Artificial Sequence
  Description of Artificial Sequence: Synthetic primer
tcccgctctcaaa

SEQ ID NO: 7189 - DNA, 13 bp, Artificial Sequence
  Description of Artificial Sequence: Synthetic primer
gacgatcacttcg

SEQ ID NO: 7190 - DNA, 13 bp, Artificial Sequence
  Description of Artificial Sequence: Synthetic primer
tgctgctctacat

SEQ ID NO: 7191 - DNA, 13 bp, Artificial Sequence
  Description of Artificial Sequence: Synthetic primer
cagcagctgtttc

SEQ ID NO: 7192 - DNA, 13 bp, Artificial Sequence
  Description of Artificial Sequence: Synthetic primer
gctttctatatat

SEQ ID NO: 7193 - DNA, 13 bp, Artificial Sequence
  Description of Artificial Sequence: Synthetic primer
tgccattacttcg

SEQ ID NO: 7194 - DNA, 13 bp, Artificial Sequence
  Description of Artificial Sequence: Synthetic primer
tcagcgtaaaatt

SEQ ID NO: 7195 - DNA, 13 bp, Artificial Sequence
  Description of Artificial Sequence: Synthetic primer
accggttattaag

SEQ ID NO: 7196 - DNA, 13 bp, Artificial Sequence
  Description of Artificial Sequence: Synthetic primer
gagagaagtttct

SEQ ID NO: 7197 - DNA, 13 bp, Artificial Sequence
  Description of Artificial Sequence: Synthetic primer
ggcggtacactgt

SEQ ID NO: 7198 - DNA, 13 bp, Artificial Sequence
  Description of Artificial Sequence: Synthetic primer
caccggcgtgtta

SEQ ID NO: 7199 - DNA, 13 bp, Artificial Sequence
  Description of Artificial Sequence: Synthetic primer
agctgccgatccg

SEQ ID NO: 7200 - DNA, 13 bp, Artificial Sequence
  Description of Artificial Sequence: Synthetic primer
tcacaataattgg

SEQ ID NO: 7201 - DNA, 13 bp, Artificial Sequence
  Description of Artificial Sequence: Synthetic primer
ttgccgcagccag

SEQ ID NO: 7202 - DNA, 13 bp, Artificial Sequence
  Description of Artificial Sequence: Synthetic primer
agcgcaggcgtca

SEQ ID NO: 7203 - DNA, 13 bp, Artificial Sequence
  Description of Artificial Sequence: Synthetic primer
attatcactggaa

SEQ ID NO: 7204 - DNA, 13 bp, Artificial Sequence
  Description of Artificial Sequence: Synthetic primer
acacgcgaatatc

SEQ ID NO: 7205 - DNA, 13 bp, Artificial Sequence
  Description of Artificial Sequence: Synthetic primer
gaatgccggtctg

SEQ ID NO: 7206 - DNA, 13 bp, Artificial Sequence
  Description of Artificial Sequence: Synthetic primer
ttggccgcgagat

SEQ ID NO: 7207 - DNA, 13 bp, Artificial Sequence
  Description of Artificial Sequence: Synthetic primer
cgccggtgattgc

SEQ ID NO: 7208 - DNA, 13 bp, Artificial Sequence
  Description of Artificial Sequence: Synthetic primer
gtgtcgccgtagg

SEQ ID NO: 7209 - DNA, 13 bp, Artificial Sequence
  Description of Artificial Sequence: Synthetic primer
caacgataattaa

SEQ ID NO: 7210 - DNA, 13 bp, Artificial Sequence
  Description of Artificial Sequence: Synthetic primer
caccaccattgtc

SEQ ID NO: 7211 - DNA, 13 bp, Artificial Sequence
  Description of Artificial Sequence: Synthetic primer
cccagtgtcagtt

SEQ ID NO: 7212 - DNA, 13 bp, Artificial Sequence
  Description of Artificial Sequence: Synthetic primer
agcgcgtgctgca

SEQ ID NO: 7213 - DNA, 13 bp, Artificial Sequence
  Description of Artificial Sequence: Synthetic primer
acgctcagccttc

SEQ ID NO: 7214 - DNA, 13 bp, Artificial Sequence
  Description of Artificial Sequence: Synthetic primer
ttcgctcgatcca

SEQ ID NO: 7215 - DNA, 13 bp, Artificial Sequence
  Description of Artificial Sequence: Synthetic primer
ggcattaaccccg

SEQ ID NO: 7216 - DNA, 13 bp, Artificial Sequence
  Description of Artificial Sequence: Synthetic primer
tttctaaaggaaa

SEQ ID NO: 7217 - DNA, 13 bp, Artificial Sequence
  Description of Artificial Sequence: Synthetic primer
gtggcgacgccat

SEQ ID NO: 7218 - DNA, 13 bp, Artificial Sequence
  Description of Artificial Sequence: Synthetic primer
ctattaccatgag

SEQ ID NO: 7219 - DNA, 13 bp, Artificial Sequence
  Description of Artificial Sequence: Synthetic primer
cagtgaaattagc

SEQ ID NO: 7220 - DNA, 13 bp, Artificial Sequence
  Description of Artificial Sequence: Synthetic primer
tgtaccccggtgc

SEQ ID NO: 7221 - DNA, 13 bp, Artificial Sequence
  Description of Artificial Sequence: Synthetic primer
taccgaaagcagc

SEQ ID NO: 7222 - DNA, 13 bp, Artificial Sequence
  Description of Artificial Sequence: Synthetic primer
agcttatctctat

SEQ ID NO: 7223 - DNA, 13 bp, Artificial Sequence
  Description of Artificial Sequence: Synthetic primer
agtttctgaattt

SEQ ID NO: 7224 - DNA, 13 bp, Artificial Sequence
  Description of Artificial Sequence: Synthetic primer
cattaaagacttg

SEQ ID NO: 7225 - DNA, 13 bp, Artificial Sequence
  Description of Artificial Sequence: Synthetic primer
ccacgactttccc

SEQ ID NO: 7226 - DNA, 13 bp, Artificial Sequence
  Description of Artificial Sequence: Synthetic primer
ttttacaaagggg

SEQ ID NO: 7227 - DNA, 13 bp, Artificial Sequence
  Description of Artificial Sequence: Synthetic primer
gtactggttccgg

SEQ ID NO: 7228 - DNA, 13 bp, Artificial Sequence
  Description of Artificial Sequence: Synthetic primer
ccctgccgttcct

SEQ ID NO: 7229 - DNA, 13 bp, Artificial Sequence
  Description of Artificial Sequence: Synthetic primer
aaattgattgact

SEQ ID NO: 7230 - DNA, 13 bp, Artificial Sequence
  Description of Artificial Sequence: Synthetic primer
gcgcagtgtgacg

SEQ ID NO: 7231 - DNA, 13 bp, Artificial Sequence
  Description of Artificial Sequence: Synthetic primer
aagtcacttttcg

SEQ ID NO: 7232 - DNA, 13 bp, Artificial Sequence
  Description of Artificial Sequence: Synthetic primer
tggagaacatgct

SEQ ID NO: 7233 - DNA, 13 bp, Artificial Sequence
  Description of Artificial Sequence: Synthetic primer
ttggagcttttaa

SEQ ID NO: 7234 - DNA, 13 bp, Artificial Sequence
  Description of Artificial Sequence: Synthetic primer
gctgtgggtggaa

SEQ ID NO: 7235 - DNA, 13 bp, Artificial Sequence
  Description of Artificial Sequence: Synthetic primer
tatagctcgagca

SEQ ID NO: 7236 - DNA, 13 bp, Artificial Sequence
  Description of Artificial Sequence: Synthetic primer
atcgcctgttcaa

SEQ ID NO: 7237 - DNA, 13 bp, Artificial Sequence
  Description of Artificial Sequence: Synthetic primer
aagatgaagcaaa

SEQ ID NO: 7238 - DNA, 13 bp, Artificial Sequence
  Description of Artificial Sequence: Synthetic primer
ccgccgtgcattg

SEQ ID NO: 7239 - DNA, 13 bp, Artificial Sequence
  Description of Artificial Sequence: Synthetic primer
cggaagtgatagc

SEQ ID NO: 7240 - DNA, 13 bp, Artificial Sequence
  Description of Artificial Sequence: Synthetic primer
ccagcatctgcgt

SEQ ID NO: 7241 - DNA, 13 bp, Artificial Sequence
  Description of Artificial Sequence: Synthetic primer
tttgtagttctgc

SEQ ID NO: 7242 - DNA, 13 bp, Artificial Sequence
  Description of Artificial Sequence: Synthetic primer
gcagctgaccaag

SEQ ID NO: 7243 - DNA, 13 bp, Artificial Sequence
  Description of Artificial Sequence: Synthetic primer
acggtttccggga

SEQ ID NO: 7244 - DNA, 13 bp, Artificial Sequence
  Description of Artificial Sequence: Synthetic primer
tcgatcatcggca

SEQ ID NO: 7245 - DNA, 13 bp, Artificial Sequence
  Description of Artificial Sequence: Synthetic primer
catcttcaccgcc

SEQ ID NO: 7246 - DNA, 13 bp, Artificial Sequence
  Description of Artificial Sequence: Synthetic primer
actgcttgttcta

SEQ ID NO: 7247 - DNA, 13 bp, Artificial Sequence
  Description of Artificial Sequence: Synthetic primer
agctgggctccag

SEQ ID NO: 7248 - DNA, 13 bp, Artificial Sequence
  Description of Artificial Sequence: Synthetic primer
gacgagctgttcg

SEQ ID NO: 7249 - DNA, 13 bp, Artificial Sequence
  Description of Artificial Sequence: Synthetic primer
cagtaccttctcg

SEQ ID NO: 7250 - DNA, 13 bp, Artificial Sequence
  Description of Artificial Sequence: Synthetic primer
gaagaattcactg

SEQ ID NO: 7251 - DNA, 13 bp, Artificial Sequence
  Description of Artificial Sequence: Synthetic primer
tcaacgccgatgg

SEQ ID NO: 7252 - DNA, 13 bp, Artificial Sequence
  Description of Artificial Sequence: Synthetic primer
tttcttcgtttac

SEQ ID NO: 7253 - DNA, 13 bp, Artificial Sequence
  Description of Artificial Sequence: Synthetic primer
tagtcggagcatt

SEQ ID NO: 7254 - DNA, 13 bp, Artificial Sequence
  Description of Artificial Sequence: Synthetic primer
tcattgctgttaa

SEQ ID NO: 7255 - DNA, 13 bp, Artificial Sequence
  Description of Artificial Sequence: Synthetic primer
gggcgtggaactc

SEQ ID NO: 7256 - DNA, 13 bp, Artificial Sequence
  Description of Artificial Sequence: Synthetic primer
tcctatcagccat

SEQ ID NO: 7257 - DNA, 13 bp, Artificial Sequence
  Description of Artificial Sequence: Synthetic primer
accatgagcacgg

SEQ ID NO: 7258 - DNA, 13 bp, Artificial Sequence
  Description of Artificial Sequence: Synthetic primer
ggtcattctgtca

SEQ ID NO: 7259 - DNA, 13 bp, Artificial Sequence
  Description of Artificial Sequence: Synthetic primer
tgacaccactcat

SEQ ID NO: 7260 - DNA, 13 bp, Artificial Sequence
  Description of Artificial Sequence: Synthetic primer
agcggcacggtca

SEQ ID NO: 7261 - DNA, 13 bp, Artificial Sequence
  Description of Artificial Sequence: Synthetic primer
caatcacagcgat

SEQ ID NO: 7262 - DNA, 13 bp, Artificial Sequence
  Description of Artificial Sequence: Synthetic primer
cgctatctcatta

SEQ ID NO: 7263 - DNA, 13 bp, Artificial Sequence
  Description of Artificial Sequence: Synthetic primer
tatgagttgctcg

SEQ ID NO: 7264 - DNA, 13 bp, Artificial Sequence
  Description of Artificial Sequence: Synthetic primer
agtgcaatgtcgt

SEQ ID NO: 7265 - DNA, 13 bp, Artificial Sequence
  Description of Artificial Sequence: Synthetic primer
ccagcggtacgtt

SEQ ID NO: 7266 - DNA, 13 bp, Artificial Sequence
  Description of Artificial Sequence: Synthetic primer
tgctcgaatatgc

SEQ ID NO: 7267 - DNA, 13 bp, Artificial Sequence
  Description of Artificial Sequence: Synthetic primer
gctcagattgctg

SEQ ID NO: 7268 - DNA, 13 bp, Artificial Sequence
  Description of Artificial Sequence: Synthetic primer
ccgcagatgtttg

SEQ ID NO: 7269 - DNA, 13 bp, Artificial Sequence
  Description of Artificial Sequence: Synthetic primer
cacatcaccgttt

SEQ ID NO: 7270 - DNA, 13 bp, Artificial Sequence
  Description of Artificial Sequence: Synthetic primer
tggtccataccgc

SEQ ID NO: 7271 - DNA, 13 bp, Artificial Sequence
  Description of Artificial Sequence: Synthetic primer
acggcccaagctg

SEQ ID NO: 7272 - DNA, 13 bp, Artificial Sequence
  Description of Artificial Sequence: Synthetic primer
ctcgactgcgatg

SEQ ID NO: 7273 - DNA, 13 bp, Artificial Sequence
  Description of Artificial Sequence: Synthetic primer
agaaacaagctta

SEQ ID NO: 7274 - DNA, 13 bp, Artificial Sequence
  Description of Artificial Sequence: Synthetic primer
gattggataatta

SEQ ID NO: 7275 - DNA, 13 bp, Artificial Sequence
  Description of Artificial Sequence: Synthetic primer
agcgacctgatag

SEQ ID NO: 7276 - DNA, 13 bp, Artificial Sequence
  Description of Artificial Sequence: Synthetic primer
ggtgctgtccaag

SEQ ID NO: 7277 - DNA, 13 bp, Artificial Sequence
  Description of Artificial Sequence: Synthetic primer
atcaacaggtatc

SEQ ID NO: 7278 - DNA, 13 bp, Artificial Sequence
  Description of Artificial Sequence: Synthetic primer
tctcggtgcaggg

SEQ ID NO: 7279 - DNA, 13 bp, Artificial Sequence
  Description of Artificial Sequence: Synthetic primer
ctgccttatgttg

SEQ ID NO: 7280 - DNA, 13 bp, Artificial Sequence
  Description of Artificial Sequence: Synthetic primer
cgcggtcttcgta

SEQ ID NO: 7281 - DNA, 13 bp, Artificial Sequence
  Description of Artificial Sequence: Synthetic primer
aacttgtattgca

SEQ ID NO: 7282 - DNA, 13 bp, Artificial Sequence
  Description of Artificial Sequence: Synthetic primer
ctacaatttcttt

SEQ ID NO: 7283 - DNA, 13 bp, Artificial Sequence
  Description of Artificial Sequence: Synthetic primer
tggtggttcacct

SEQ ID NO: 7284 - DNA, 13 bp, Artificial Sequence
  Description of Artificial Sequence: Synthetic primer
tgtgtccaacgat

SEQ ID NO: 7285 - DNA, 13 bp, Artificial Sequence
  Description of Artificial Sequence: Synthetic primer
tgtcgcgtggtgt

SEQ ID NO: 7286 - DNA, 13 bp, Artificial Sequence
  Description of Artificial Sequence: Synthetic primer
tcggatgtgcgct

SEQ ID NO: 7287 - DNA, 13 bp, Artificial Sequence
  Description of Artificial Sequence: Synthetic primer
caggtagtagtct

SEQ ID NO: 7288 - DNA, 13 bp, Artificial Sequence
  Description of Artificial Sequence: Synthetic primer
acgcgatgaacgt

SEQ ID NO: 7289 - DNA, 13 bp, Artificial Sequence
  Description of Artificial Sequence: Synthetic primer
tgccgcaggcgtt

SEQ ID NO: 7290 - DNA, 13 bp, Artificial Sequence
  Description of Artificial Sequence: Synthetic primer
cgctaactcagta

SEQ ID NO: 7291 - DNA, 13 bp, Artificial Sequence
  Description of Artificial Sequence: Synthetic primer
accgggtacgggt

SEQ ID NO: 7292 - DNA, 13 bp, Artificial Sequence
  Description of Artificial Sequence: Synthetic primer
tacacgccgtggc

SEQ ID NO: 7293 - DNA, 13 bp, Artificial Sequence
  Description of Artificial Sequence: Synthetic primer
tgtttccttcact

SEQ ID NO: 7294 - DNA, 13 bp, Artificial Sequence
  Description of Artificial Sequence: Synthetic primer
cctttatatatgt

SEQ ID NO: 7295 - DNA, 13 bp, Artificial Sequence
  Description of Artificial Sequence: Synthetic primer
tgcaatgtctgaa

SEQ ID NO: 7296 - DNA, 13 bp, Artificial Sequence
  Description of Artificial Sequence: Synthetic primer
ttggaacgaaaag

SEQ ID NO: 7297 - DNA, 13 bp, Artificial Sequence
  Description of Artificial Sequence: Synthetic primer
ccaaagcaggaga

SEQ ID NO: 7298 - DNA, 13 bp, Artificial Sequence
  Description of Artificial Sequence: Synthetic primer
aatactcattggt

SEQ ID NO: 7299 - DNA, 13 bp, Artificial Sequence
  Description of Artificial Sequence: Synthetic primer
cacgttgtttgat

SEQ ID NO: 7300 - DNA, 13 bp, Artificial Sequence
  Description of Artificial Sequence: Synthetic primer
taactgcggttag

SEQ ID NO: 7301 - DNA, 13 bp, Artificial Sequence
  Description of Artificial Sequence: Synthetic primer
tgtatggaaaatg

SEQ ID NO: 7302 - DNA, 13 bp, Artificial Sequence
  Description of Artificial Sequence: Synthetic primer
catccccggcact

SEQ ID NO: 7303 - DNA, 13 bp, Artificial Sequence
  Description of Artificial Sequence: Synthetic primer
tgattacgcgctt

SEQ ID NO: 7304 - DNA, 13 bp, Artificial Sequence
  Description of Artificial Sequence: Synthetic primer
ttgtcctgccgct

SEQ ID NO: 7305 - DNA, 13 bp, Artificial Sequence
  Description of Artificial Sequence: Synthetic primer
ttaagcgcttgat

SEQ ID NO: 7306 - DNA, 13 bp, Artificial Sequence
  Description of Artificial Sequence: Synthetic primer
actgtttgccaca

SEQ ID NO: 7307 - DNA, 13 bp, Artificial Sequence
  Description of Artificial Sequence: Synthetic primer
tgttcatattgat

SEQ ID NO: 7308 - DNA, 13 bp, Artificial Sequence
  Description of Artificial Sequence: Synthetic primer
ccagccggatgta

SEQ ID NO: 7309 - DNA, 13 bp, Artificial Sequence
  Description of Artificial Sequence: Synthetic primer
tgaatgtaccgtt

SEQ ID NO: 7310 - DNA, 13 bp, Artificial Sequence
  Description of Artificial Sequence: Synthetic primer
ccactgaaaccga

SEQ ID NO: 7311 - DNA, 13 bp, Artificial Sequence
  Description of Artificial Sequence: Synthetic primer
acctataacaatt

SEQ ID NO: 7312 - DNA, 13 bp, Artificial Sequence
  Description of Artificial Sequence: Synthetic primer
ctccgtcaatacc

SEQ ID NO: 7313 - DNA, 13 bp, Artificial Sequence
  Description of Artificial Sequence: Synthetic primer
agaacaccggagt

SEQ ID NO: 7314 - DNA, 13 bp, Artificial Sequence
  Description of Artificial Sequence: Synthetic primer
taccaggccgatg

SEQ ID NO: 7315 - DNA, 13 bp, Artificial Sequence
  Description of Artificial Sequence: Synthetic primer
attgataaaaccg

SEQ ID NO: 7316 - DNA, 13 bp, Artificial Sequence
  Description of Artificial Sequence: Synthetic primer
aacagatttagcg

SEQ ID NO: 7317 - DNA, 13 bp, Artificial Sequence
  Description of Artificial Sequence: Synthetic primer
tcttggctactgc

SEQ ID NO: 7318 - DNA, 13 bp, Artificial Sequence
  Description of Artificial Sequence: Synthetic primer
ccgaagctgacta

SEQ ID NO: 7319 - DNA, 13 bp, Artificial Sequence
  Description of Artificial Sequence: Synthetic primer
atatacaagccga

SEQ ID NO: 7320 - DNA, 13 bp, Artificial Sequence
  Description of Artificial Sequence: Synthetic primer
gcatcttcatagc

SEQ ID NO: 7321 - DNA, 13 bp, Artificial Sequence
  Description of Artificial Sequence: Synthetic primer
cggcaccttgaac

SEQ ID NO: 7322 - DNA, 13 bp, Artificial Sequence
  Description of Artificial Sequence: Synthetic primer
ccattggggttgg

SEQ ID NO: 7323 - DNA, 13 bp, Artificial Sequence
  Description of Artificial Sequence: Synthetic primer
ccctgttcctttc

SEQ ID NO: 7324 - DNA, 13 bp, Artificial Sequence
  Description of Artificial Sequence: Synthetic primer
caatgacgtgtaa

1. A method for designing spiked primer sequences that enrich sequencing reads for detecting a taxon or taxa of pathogenic microorganisms in a sample, the method comprising:
(i) performing multiple sequence alignments (MSA) of a plurality of genomes from a set of one or more reference genomes from a taxon or taxa of pathogens;
(ii) partitioning the MSA-aligned genomes into overlapping 300 to 600 nucleotide (nt) segments with at least a 150 nt overlap;
(iii) selecting forward and/or reverse candidate primer sequences having lengths that are within a range of 11 bp to 17 bp from 30 to 70 nt regions at the ends of each 300 to 600 nt segment by frequency of occurrence in the set of overlapping 300 to 600 nt segments:
(iv) ranking the candidate primer sequences iteratively in reverse order by frequency of occurrence in the overlapping 300 to 600 nucleotide (nt) segments;
(v) selecting top candidate primer sequences based upon the candidate primer sequences being shared by the most 300 to 600 nt segments and by not containing any ambiguous 300 to 600 nt segments;
(vi) removing 300 to 600 nt segments which share top candidate primer sequences and repeating steps (iii) to (v) until the number of the remaining 300 to 600 nt segments containing a shared candidate primer sequence is below a pre-designated threshold integer value selected from 1 to 15 in order to generate a set of top candidate primer sequences;
(viii) generating a set of spiked primer sequences from the set of top candidate primer sequences by removing top candidate primer sequences that (a) have melting temperatures (Tₘ) greater than 2 standard deviations from the mean, (b) are predicted to self-dimerize or cross dimerize with a hybridization ΔG<−9 kcal/mol or lower, and/or (c) have homopolymer repeats of greater than 5 nucleotides.

2. The method of claim 1, wherein the set of one or more reference genomes are from a taxon or taxa of pathogenic bacteria, viruses, protozoa, fungi, archaea, algae and/or eukaryotic parasites.

3. The method of claim 1, wherein the set of one or more reference genomes encompasses viral genomes selected from a taxon or taxa of one or more Families of viruses including Reoviridae, Caliciviridae, Flaviviridae, Orthomyxoviridae, Picornaviridae, Togaviridae, Paramyxoviridae, Bunyaviridae, Rhabdoviridae, Filoviridae, Coronaviridae, Astroviridae, Bornaviridae, Arteriviridae, Hepeviridae, and/or Retroviridae.

4. (canceled)

5. The method of claim 1, wherein the set of one or more reference genomes encompasses viral genomes selected from a taxon or taxa of one or more Genera of viruses including Ahjdlikevirus, Alfamovirus, Allexivirus, Allolevivirus, Alphabaculovirus, Alphacarmotetravirus, Alphacoronavirus, Alphaentomopoxvirus, Alphafusellovirus, Alphaguttavirus, Alphalipothrixvirus, Alphamesonivirus, Alphanecrovirus, Alphanodavirus, Alphanudivirus, Alphapapfflomavirud, Alphapartifivirus, Alphapermutotetravirus, Alpha retro virus, Alphasphaerolipovirus, Alphaspiravirus, Alphatorquevirus, Alphaturrivirus, Alphavirus, Amalgavirus, Ambidensovirus Amdoparvovirus, Ampelovirus, Ampullavirus, Andromedalikevirus, Anulavirus, Aparavirus, Aphthovirus, Apscaviroid, Aquabimavirus, Aqua ma virus, Aquaparamyxovirus, Aquareovirus, Arterivirus, Ascovirus, Asfivirus, Atadenovirus, Aureusvirus, Aurivirus Avastrovirus, Avenavirus, Aveparvovirus, Aviadenovirus, Avibimavirus, Avihepadnavirus, Avihepatovirus, Avipoxvirus, Avisivirus, Avsunviroid, Avulavirus, Bacifiamavirus, Babuvirus, Bacilladnavirus, Bamavirus, Badnavirus, Bafinivirus, Bcep22likevirus, Bamyardlikevirus, Batrachovirus, Bdellomicrovirus, Bcep78likevirus, Bcepmulikevirus, Benyvirus, Becurtovirus, Begomovirus, Betaentomopoxvirus, Betabaculovirus, Betacoronavirus, Betalipothrixvirus, Betafusellovirus, Beta gutta virus, Betanudivirus, Betanecrovirus, Betanodavirus, Betaretrovirus, Betapapillomavirus, Betapartitivirus, Betatorquevirus, Betasphaerolipovirus, Beta tetra virus, Bignuzlikevirus, Bicaudavirus, Bidensovirus, Bomavirus, Blosnavirus, Bocaparvovirus, Bracovirus, Botrexvirus, Bppunalikevirus, Bromovirus, Brambyvirus, Brevidensovirus, Bronlikevirus, Cafeteria virus, Bymovirus, Cardiovirus, C2likevirus, C5likevirus, Carmovirus, Capillovirus, Capripoxvirus, Cervidpoxvirus, Cardoreovirus, Carla virus, Che9clikevirus, Caulimovirus, Cavemovirus, Chipapillomavirus, Charlielikevirus, Che8likevirus, Chloro virus, Cheravirus, Chilikevirus, Circovirus, Chlamydiamicrovirus, Chloriridovirus, Clava virus, Chrysovirus, Cilevirus, Coccolithovirus, Citrivirus, Cjwunalikevirus, Comovirus, Closterovirus, Cocadviroid, Corticovirus, Coleviroid, Coltivirus, Cp8unalikevirus, Copiparvovirus, Comdoglikevirus, Crocodylidpoxvirus, Cosa virus, Cp220likevirus, Cuevavirus, Crinivirus, Cripavirus, Cyprinivirus, Cryspovirus, Cucumovirus, Cytorhabdovirus, Curtovirus, Cypovirus, Cysto virus, Cytomegalovirus, D3likevirus, Deltalipothrixvirus, Deltabaculovirus, D3112likevirus, Deltaretrovirus, Deltapapillomavirus, Deltacoronavirus, Dependoparvovirus, Deltatorquevirus, Deltapartitivirus, Dinodnavirus, Dianthovirus, Delta virus, Dyodeltapapillomavirus, Dinomavirus, Dicipivirus, Dyoiotapapillomavirus, Dyoepsilonpapillomavirus, Dinovemavirus, Dyomupapillomavirus, Dyokappapapillomavirus, Dyoetapapillomavirus, Dyopipapillomavirus, Dyonupapillomavirus, Dyolambdapapillomavirus, Dyothetapapillomavirus Dyorhopapillomavirus, Dyoomikronpapillomavirus, Dyoxipapillomavirus, Dyosigmapapillomavirus, Dyozetapapillomavirus, Emaravirus, Enterovirus, Ebola virus, Epsilon15likevirus, Enamovirus, Elaviroid, Epsilontorquevirus, Entomobimavirus, Endomavirus, Errantivirus, Epsilonpapillomavirus, Ephemerovirus, Etatorquevirus, Eragrovirus, Epsilonretrovirus, Fabavirus, Erythroparvovirus, Erbovirus, Fijivirus, Felixounalikevirus, Etapapillomavirus, Furovirus, Flavivirus, F116likevirus, Ferlavirus, Fovea virus, Gallivirus, Gammabaculovirus, Gammaentomopoxvirus, Gammalipothrixvirus, Gammapartitivirus, Gamma retro virus, Gallantivirus, Gammatorquevirus, Giardia virus, Gammacoronavirus, Glossina virus, Gyro virus, Gamma papilloma virus, Gammasphaerolipovirus, Globulovirus, Halolikevirus, Hantavirus, Hemi virus, Henipavirus, Hepandensovirus, Hepato virus, Hapunalikevirus, Hk578likevirus, Hordeivirus, Hepacivirus, Hpunalikevirus, Hunnivirus, Higrevirus, Hostuviroid, Hypovirus, Ichtadenovirus, 13likevirus, Idnoreovirus, Ictalurivirus, Ilarvirus, lebhlikevirus, Ichnovirus, Influenzavirus B, Iltovirus, Idaeovirus, Iotapapillomavirus, Influenzavirus C, Iflavirus, Iridovirus, lotatorquevirus, Influenzavirus A, Inovirus, Ipomovirus, Isavirus, Iteradensovirus, Jerseylikevirus, Kappapapillomavirus, Kappatorquevirus, Kobuvirus, Kunsagivirus, Labymavirus, Lambdapapillomavirus, Lagovirus, Lentivirus, Lambdatorquevirus, L5likevirus, Lola virus, Leporipoxvirus, Lambdalikevirus, Lymphocryptovirus, Luteovirus, Leishmania virus, Lymphocystivirus, Levi virus, Luz24likevirus, Lyssavirus, Machlomovirus, Mamastrovirus, Macanavirus, Marafivirus, Macluravirus, Marna virus, Mammarenavirus, Macavirus, Mastrevirus, Marburg virus, Macula virus, Megrivirus, Marseille virus, Mandarivirus, Micro virus, Megabimavirus, Mardivirus, Mischivirus, Metapneumovirus, Mastadenovirus, Morbillivirus, Mimi virus, Megalocytivirus, Mupapillomavirus, Mitovirus, Meta virus, Mycoflexivirus, Mosavirus, Mimoreovirus, Muromegalovirus, Molluscipoxvirus, Mycoreovirus, Mulikevirus, Musca virus, N15likevirus, Nanovirus, Nepovirus, N4likevirus, Nucleorhabdovirus, Namavirus, Nairovirus, Norovirus, Nebovirus, Nupapillomavirus, Novirhabdovirus, Nyavirus, Omegalikevirus, Omikronpapillomavirus, Orthobunyavirus, Oka virus, Orthopoxvirus, Omega papilloma virus, Oleavirus, Oscivirus, Ophiovirus, Omegatetravirus, Orthohepadnavirus, Orbivirus, Orthoreovirus, Orthohepevirus, Ostreavirus, Oryzavirus, Ourmiavirus, Parechovirus, Pbiunalikevirus, Pegivirus, P2likevirus, P22likevirus, Percavirus, Panicovirus, P23likevirus, Petuvirus, Pasivirus, Parapoxvirus, Phi29likevirus, Pbunalikevirus, Passerivirus, Phicd119likevirus, Pelamoviroid, Peduvirus, Phietalikevirus, Perhabdovirus, Penstyldensovirus, Phrjlunalikevirus, Pgonelikevirus, Pestivirus, Phipapillomavirus, Phic3unalikevirus, Phaeovirus, Picobimavirus, Phie125likevirus, Phicbklikevirus, Plasma virus, Phifllikevirus, Phieco32likevirus, Poacevirus, Phikmvlikevirus, Phihlikevirus, Polyomavirus, Phlebovirus, Phikzlikevirus, Potexvirus, Pipapillomavirus, Phytoreovirus, Proboscivirus, Plectrovirus, Piscihepevirus, Pseudovirus, Polemovirus, Pneumovirus, Punalikevirus, Pomovirus, Polerovirus, Potyvirus, Pospiviroid, Protoparvovirus, Prasinovirus, Prymnesiovirus, Psimunalikevirus, Psipapillomavirus, Quaranjavirus, Quadrivirus, Raphidovirus, Reylikevirus, Rhopapillomavirus, Reptarenavirus, Roseolovirus, Rhadinovirus, Rubulavirus, Rosadnavirus, Rana virus, Rotavirus, Respirovirus, Rubivirus, Rudivirus, Rymovirus, Rhizidiovirus, Rosa virus, Salivirus, Sap6likevirus, Schizot4virus, Sadwavirus, Seadomavirus, Salmonivirus, Sequivirus, Sapelovirus, Siadenovirus, Sclerodamavirus, Sakobuvirus, Sigma virus, Semotivirus, Salterprovirus, Skunalikevirus, Sfi1unalikevirus, Sapovirus, Soymovirus, Sicinivirus, Scuta virus, Spiromicrovirus, Simplexvirus, Seneca virus, Spumavirus, Sobemovirus, Sfi21dtunalikevirus, Sp6likevirus, Sigmapapillomavirus, Spounalikevirus, Sire virus, Suipoxvirus, Solendovirus, Spbetalikevirus, Sprivivirus, T4 virus, Taupapillomavirus, Tepovirus, Thetapapillomavirus, T5likevirus, Tibrovirus, Tectivirus, Tobravirus, Teschovirus, T7likevirus, Toro virus, Thetatorquevirus, Tenuivirus, Totivirus, Tm4likevirus, Tetraparvovirus, Trichomonasvirus, Tombusvirus, Thogotovirus, Tunalikevirus, Torradovirus, Tobamovirus, Tumcurtovirus, Tp2unalikevirus, Topocuvirus, Trichovirus, Tospovirus, Tungrovirus, Tremovirus, Twortlikevirus, Tritimovirus, Tupavirus, Tymovirus, Umbra virus, Upsilonpapillomavirus, Vancellovirus, Velarivirus, Vesiculovirus, Victorivirus, Vitivirus, Varicosavirus, Vesivirus, Viunalikevirus, Waikavirus, Wbetalikevirus, Whispovirus, Xp10likevirus, Xipapillomavirus, Yualikevirus, Yatapoxvirus, Zetapapillomavirus, Zetatorquevirus, and/or Zea virus.

6. The method of claim 1, wherein the set of one or more reference genomes encompasses viral genomes from a taxon or taxa of one or more Species of viruses including West Nile Virus, dengue virus, tick-borne encephalitis virus, Japanese encephalitis virus, yellow fever virus, Zika virus, cell fusing agent virus, Palm Creek virus and/or Parramatta River virus.

7. The method of claim 1, wherein the set of one or more reference genomes encompasses bacterial genomes from one or more from a taxon or taxa of one or more Genera of bacteria including Heliobacter, Aerobacter, Rhizobium, Agrobacterium, Bacillus, Clostridium, Pseudomonas, Xanthomonas, Nitrobacteriaceae, Nitrobacter, Nitrosomonas, Thiobacillus, Spirillum, Vibrio, Bacteroides, Corynebacterium, Listeria, Escherichia, Klebsiella, Salmonella, Serratia, Shigella, Erwinia, Rickettsia, Chlamydia, Mycoplasma, Actinomyces, Streptomyces, Mycobacterium, Polyangium, Micrococcus, Staphylococcus, Lactobacillus, Diplococcus, Streptococcus, and/or Campylobacter.

8. The method of claim 1, wherein the set of one or more reference genomes encompasses fungal genomes from one or more from a taxon or taxa of one or more Genera of fungi including Anaeromyces, Caecomyces, Allomyces, Entyloma, Diskagma, Blastocladia, Funneliformis, Entylomella, Coelomomyces, Glomus (fungus), Fusidium, Heptameria, Holmiella, Homostegia, Hyalocrea, Hyalosphaera, Hypholoma, Hypobryon, Hysteropsis, Koordersiella, Karschia, Kirschsteiniothelia, Lembosiopeltis, Kullhemia, Kusanobotrys, Leptodothiorella, Lanatosphaera, Lasiodiplodia, Leveilliina, Lepidopterella, Lepidostroma, Lollipopaia, Leptosphaerulina, Leptospora, Macrovalsaria, Lichenostigma, Licopolia, Massariola, Lopholeptosphaeria, Maireella, Microdothella, Macroventuria, Microcyclella, Mycoglaena, Melanodothis, Montagnella, Mycoporopsis, Moniliella, Mycopepon, Myriangium, Mycomicrothefia, Mycothyridium, Mytilostoma, Mycosphaerella, Myfifinidion, Neofusicoccum, Myriosfigmella, Neocallimasfix, Oomyces, Neopeckia, Orpinomyces, Ostreichnion, Ophiosphaerella, Paropodia, Passeriniella, Passerinula, Pedumispora, Peyronellaea, Phaeoacremonium, Phaeocyrfidula, Phaeoglaena, Phaeopeltosphaeria, Phaeoramularia, Phaeosperma, Phaneromyces, Phialophora, Philonectria, Phragmocapnias, Phragmosperma, Piedraia, Piromyces, Placocrea, Placostromella, Plagiostromella, Plejobolus, Pleostigma, Polychaeton, Pseudocercospora, Pseudocryptosporella, Pseudogymnoascus, Pseudothis, Pycnocarpon, Rhytidhysteron, Rhizophagus (fungus), Rhopographus, Roselfinula, Rhytisma, Robillardiella, Roussoellopsis, Rosenscheldia, Rostafinskia, Sarcopodium, Savulescua, Saksenaeaceae, Scolecobonaria, Scoficotrichum, Schizoparme, Semifissispora, Septoria, Scorias, Sphaceloma, Sphaerellothecium, Spathularia, Stagonosporopsis, Stenella (fungus), Sphaerulina, Stigmina (fungus), Stioclettia, Stigmidium, Sydowia, Tephromela, Stuartella, Teichosporella, Thalloloma, Taeniolella, Thalassoascus, Togninia, Teratosphaeria, Thyrospora, Thyridaria, Yarrowia, Wettsteinina, Valsaria, Ustilaginoidea, Yoshinagella, Wemerella (fungus), and/or Vismya.

9. The method of claim 1, wherein the set of one or more reference genomes encompasses genomes from one or more from a taxon or taxa of pathogenic microorganisms that are resistant to a particular anti-pathogen treatment.

10. The method of claim 9, wherein the anti-pathogen therapy is selected from an antibiotic treatment, antiviral treatment, antifungal treatment, or algicide.

11. The method of claim 1, wherein the MSA-aligned genomes are partitioned into overlapping 500 nt to 600 nt segments with a 200 nt to 300 nt overlap.

12. The method of claim 1, wherein the candidate primer sequences are 13 bp to 15 bp in length.

13. The method of claim 1, wherein the forward or reverse candidate primer sequences are selected from 40 nt to 60 nt regions at the ends of each segment.

14. The method of claim 1, further comprising the step of:
(ix) chemically synthesizing a set of spiked primers that corresponds with the set of spiked primer sequences.

15. (canceled)

16. A method of detecting a first taxon or taxa of pathogenic microorganisms in a sample, the method comprising:
applying a sequencing assay to the sample to obtain sequence reads, the sequencing assay including the set of spiked primers of claim 14 and random primers; and
analyzing the sequence reads to determine whether the first taxon of pathogenic microorganisms and/or one or more other taxa of pathogenic microorganisms are present in the sample.

17. The method of claim 16, wherein the sample is from a subject.

18. (canceled)

19. The method of claim 16, wherein the sample is selected from whole blood, serum, plasma, urine, tissue sample, biopsy sample, isolated DNA and isolated RNA.

20. (canceled)

21. The method of claim 16, wherein the sample is obtained from an environmental site believed to be infected or contaminated by a taxon or taxa of pathogenic microorganisms.

22. (canceled)

23. The method of claim 16, wherein the sample is from a vector that is known to transmit pathogenic microorganisms, wherein the vector is selected from the group consisting of a mosquito, sandfly, tick, triatomine bug, tsetse fly, flea, black fly, aquatic snail, and lice.

24. (canceled)

25. The method of claim 16, wherein the sequencing assay comprises or utilizes polymerase chain reaction (PCR).

26. (canceled)

27. The method of claim 16, wherein the sequencing assay comprises reverse transcription of a sample containing RNA using any of the primers set forth in SEQ ID NOs: 1-96, 399-1562, 1563-3553, and 3554-7324.

28. The method of claim 16, wherein the sequencing assay provides greater than 10 sequencing reads and fewer than 100,000 sequencing reads per amplified target nucleic acid.

29. The method of claim 16, wherein at least one, two, three, four, or more of the sequence regions targeted by the spiked primers were identified in the set of one or more reference sequences corresponding to the taxon or taxa of pathogenic microorganisms.

30. The method of claim 16, wherein the taxon or taxa of pathogenic microorganisms is present in the sample at a volume of less than 1,000 genome copies per mL.

31. (canceled)

32. The method of claim 16, wherein the sample comprises a different taxon or taxa of pathogenic microorganisms at a volume of between 10,000-100,000 genome copies per mL.

33. The method of claim 16, wherein at least one of the set of spiked primers of the sequencing assay comprises a nucleotide sequence selected from SEQ ID NOs:1-96 or 399-7324.

34. The method of claim 33, wherein the set of spiked primers of the sequencing assay comprises primers having nucleotide sequences of SEQ ID NOs:1-96.

35. The method of claim 33, wherein the set of spiked primers of the sequencing assay comprise primers having nucleotide sequences of SEQ ID NOs: 399-1562.

36. The method of claim 33, wherein the set of spiked primers of the sequencing assay comprise primers having nucleotide sequences of SEQ ID NOs: 1563-3553.

37. The method of claim 33, wherein the set of spiked primers of the sequencing assay comprise primers having nucleotide sequences of SEQ ID NOs: 3554-7324.

38. The method of claim 33, wherein the spiked primers further comprise an adaptor sequence.

39. The method of claim 38, wherein the adapter sequence is positioned 5′ of the spiked primer sequences and comprises the sequence of SEQ ID NO:97.

40. The method of claim 16, wherein the random primers are random hexamers, random septamers, random octamers, and/or random nonamers.

41. (canceled)

42. The method of claim 16, wherein the ratio of spiked primers to random primers in the sequencing assay is 2:1, 3:1, 4:1, 5:1, 6:1, 7:1, 8:1, 9:1, 10:1, or greater than 10:1.

43. (canceled)

44. The method of claim 16, wherein the sequencing assay further comprises a probe that is used to determine the amount of amplified product produced in the sequencing assay.

45. A kit comprising a set of spiked primers that comprises primers having nucleotide sequences of SEQ ID NOs:1-96, SEQ ID NOs: 399-1562, SEQ ID NOs: 1563-3553, and/or SEQ ID NOs: 3554-7324.

46. The kit of claim 45, wherein the primers further comprise an adapter sequence.

47. The kit of claim 46, wherein the adapter sequence is positioned 5′ of the primer sequences and comprises the sequence of SEQ ID NO:97.

48. The kit of claim 45, wherein the kit further comprises random hexamer and/or random nonamer primers.

49. The kit of claim 45, wherein the kit further comprises one or more probes having sequences selected from SEQ ID NOs:98-398.
